United States Patent Application Publication US 2024/0117295 A1 - sequence listing, part 4

SEQ ID NO: 4 - DNA, 3979097 bp, Artificial Sequence (residues 1,989,550-3,979,097 of 3,979,097)
  Synthetic E.coli genome
cgccatacccgcgggaatgaaattctctttattcctgcgctgtttattctgtttagtcttggcggcgcggtatttggtatgggagaagaggccgtcgcctttgccattatcatcgcaccgctaatggtccggctgggctatgacagtattaccaccgtcctggtgacctatattgccacgcaaatcggttttgccagtagctggatgaacccgttttgtgtggtcgttgctcaggggattgccggcgttccggtgctttctggctccgggttgcgtatcgtggtgtgggttatcgccactctgattggcctgatctttaccatggtgtacgccagtcgagtgaaaaagaatcctcttctgagtcgcgtgcatgagtccgaccgcttctttcgtgaaaagcaggctgatgttgaacaacgtccgtttacctttggtgactggctggtattgattgtcctgaccgccgtaatggtctgggtgatttggggcgtgatcgttaatgcctggtttattccagaaattgccagccagttcttcaccatgggtctggtgattggcatcatcggcgttgttttccgccttaacggcatgacggttaataccatggctagttcctttaccgaaggggcgcgaatgatgatcgcccctgccctgctggtgggtttcgccaaagggattttgctgctggtcggtaatggtgaagcgggtgatgccagcgtgttaaataccatcctcaacagcattgccaatgccattagcggtctggacaacgcggtcgcggcctggtttatgttgctcttccaggcggtatttaatttcttcgtgacgtccggttctggtcaggcggcgttaaccatgccgttactggcaccgcttggcgatctggtcggtgttaaccgtcaggttaccgtgctggcgttccagtttggtgatggcttcagtcacatcatttacccaaccagtgcgagcttaatggcaacgctcggtgtgtgcagggtggacttccgtaactggctgaaggtgggcgcgaccctacttggactgctgtttattatgtccagcgtcgtagtgatcggcgctcagttgatgggctaccactaaaaatgttaagagccgcaattgcggctcttttttcattctgccgtttcagtctctacggcttcatttttggcattgcgcttcatccacaacgctagcgctttcaggctgtctggagtgaactcatcgcagcgtgcggtgatttcttccggcgtcagccagcaaacttcactgacttcatcttcctgtagtgcgaagggaccgtgagagacgcagctgaacaatgcgccccagacacggcaatttttatcttcgaaatagaactgcccgtgctcggcaaaggggacaccggcaatgcccaactcttcttccgcttcgcgacgcgcggattccagcagttgctcatcggcctggactacaccgcctgcggtcgcatctaacatgccgggtaaaaagtcttttgtctcggtacgacgctggaccagaattttgcccatgccatcatgcacgacgatgtaagttgcacgatgacgcagacactgtgcccgcatttgttcccggctggcttgtgcaatgacttcgttctcttcattgacaatatccacccattcagtacttgccaaacgacgctgttccattatcaggaaaccttctttttctggcgctcttacggcgcattttgagttgtgggtaaattacggattaatcgcgacctgcgcaatgatactttgatcattgagtgcgattacactaagtacgtcattatccagcatgccataactcgccggattaccgcctttcggaatactcacgctgccggggttgaagtggaaaatctccccccgctgttctgccactggcagatgggtatgaccgtacaccagcacatcgttctggtttaaagcaggcagattttccgggccaaaaagatgaccatgcgtcaaaaacagacgttgtttttccagtaatacctgttgccacggcgcggttatcgggaaatgcagcagcatttgatccacttcgctgtcgcagttgccgcgcacagcgataaccttatgtgccacttcattaagccgttcagcgactttggctggcgcgtaaccctccggtaaagcattacgcgggccgtgattcaacacgtcgccaaggatcaccagccactgggcaccgctttgggcaaacaactccagaacacgttccgtcgccggtaagctcccatgaatgtcgcttgcaaacatcagtttcatcactcactcctcgtcgaaaaaacgtaagctatgatactggattctgtcgttgctatcagccagattgcttcgcgctaagtgcaataaaacgctggacagacgctcgctgccactggaatgttgcataatccaccaggcgttctggcacctcatcgccatgtagtaccaggcggttaatcattagcgccagatcagtatcagcaatgcaccattcaccaaataaattcggctgacccagtactaacaaatgttctgccatcgcgaacagtttctctgcactggcttttccctcggccgttagtggcgcttttttcgcccccgcaaagacaacatccgtcggacgctcttcgcggatgggcatcagatcgctgcgcagccaggcctgaatctgtcgtgcacgcgcacgattttctaaatcaagcggataaatacgttcccaggtcggtggcgcaaatcgatcttccagatactccgcaatggcagaagattcactcaactcaaaatcatcgatttgtaataacggcacacggcgtgtctgaccgtaaccttgccacgtcggctgcaaatgttcaccgctgtcgaggtcgatggtcttgatatgaaagctcaggcctttttcctgcaacgccacccaggcggataacacataaggggagaaaaagtgggcatcactccaaagcgtgatagcgggtttactcattatgtcctcggcaataaagggggctggctatcaaactatagagcctttttgtcactgtcacgtgacgaatactcacgtaagtcgccgcgctttctatacttgtggtgttcagatgattaaacaaccggagctgcaatgatcgatctctatttcgccccgacacccaatggtcacaaaattacgctgtttctcgaagaagcagagctggattatcgcttgattaaggtagacctggggaaaggcggtcagtttcgtccggaatttttgcgcattagccccaacaacaaaattccggcaattgttgatcattctcctgccgatggcggcgaaccgctaagcctctttgagtctggtgccattttgttgtatctggctgagaaaacaggactctttttgagtcatgaaacgcgtgagcgcgccgccacattacagtggttattctggcaggtaggcggactggggccgatgcttgggcaaaatcatcattttaatcacgcagccccccaaaccattccttacgctattgaacgttatcaggttgaaactcagcgtctttaccatgtactgaacaagcggctggaaaacagcccctggctgggaggcgagaactacagcattgcggatattgcctgctggccgtgggttaatgcctggactcgccagcgaattgacctagcaatgtatccggcagtcaagaactggcatgagcggatccgtagccgccctgccaccgggcaggcactgctaaaagcacaactcggtgatgagcgtagcgatagttaacagaaacaggttctcgtgtattatttcatcctaagtaaaacaacggagaacctgcaatggcacaacctgccgctattattcgtataaagaaccttcgtttgcgtacgtttatcggaattaaggaagaagaaattaacaaccgtcaggatattgttatcaatgtgacgatccactaccccgccgataaagcgcgcactagcgaagatatcaacgatgcgctgaattatcgcaccgtaacgaaaaacattattcagcatgtagagaataaccgtttctctttgctggaaaaattaactcaggatgtgctcgatatcgcacgtgaacatcactgggtgacgtatgctgaagtggagatcgataaactgcacgcgctgcgctacgccgatagcgtatccatgaccttaagctggcagcgttaatcgccatatcgggaggctgcatgaacatagtgatcaccggagggacaggattaattggtcgccatttgattccgcgtttgctggagctgggccatcaaattacggtagtgacgcgtaacccgcagaaagccagttccgttctcggccctcgggtgacactatggcaagggcttgccgatcaaagcaacctcaacggcgttgatgcggtaatcaacctggccggagaaccgattgctgataaacgctggactcacgagcaaaaagagcgtctctgccaaagccgctggaatatcacgcaaaaactggtcgatttgattaatgccagcgacacgccaccgagcgtactcatttccggcagcgcaacgggctattatggtgacttaggtgaagtggtggttaccgaagaggaaccgccgcataacgaatttacccataaactctgcgctcgctgggaagaaattgcctgccgggcgcaaagtgacaaaacgcgagtgtgcctgctgcgtaccggtgtagtgctggcaccggatggcggtattctcggtaaaatgctgccgccgtttcgtcttggcctgggcgggccgattggctctggtcggcagtatctggcctggattcatattgatgatatggtcaacggtattctctggctgctggataacgagctgcgcgggccatttaatatggttagcccctacccggtacgcaatgaacaatttgcccatgcgctcggtcatgcgctgcatcgcccggccattttgcgcgtccccgcgaccgccattcgactgttaatgggcgaatctagtgtactggtattaggtggacaacgcgcgctgcctaaacggctggaagaagcgggttttgcgtttcgctggtacgatttagaagaggcgctggcggatgtcgttcgctgatgtggtttacagcaaacatccgccagttaactcccggtgttacaggattagtggctttgcgcgataagatcgtctggactaagtcgggtcaccatcataactaactctctgtctaaacctctatccagcatctcctgagcaatacgcagggcttcttcgtgtttgccctgcattgcgccttcttcacgtaatctgtcagcaatggtcatcagtttctccttttcttgtggtgcgcgttccgctatctcaccaataaatgcacgaaaacgctgggcatcccctgtttgtaatacgtaattaaacagggcttttagctgtctgtcattagtgttccctgtaactagcaggctaacaatttggtcgactaatcccaacagatcgcgctgacgaatatgtttctgaattaactccaacagcgccattttgcggtgttgcataatctcgtcatccggcaccacggtaatatccaccaacggaaaagcgctactatatattttgcgggctatagcaggctcggcaaattcatcaagccagcagagactataaggataaggacttctgcaaccatgataaaacagcatcgggagcaccaatggaagctctttatagcccgcatcaagatggttttgcattgccgcaatggaataacgcatcatgcgaaaagccattaattcttccggcttactttggtgctctatcactacataaatataacccactccctcctgcgttttcacagaccacaagaggtcggaataatattgccgcaggtcttcatcaataaaactgtttggttccagtttaagcgtcgttaaatcacacagtttgcgcagcggcgcgggaagatgaatatcaataaaatcccgcgcggtgtctggatggcgtaaaaaagatttaaataccgcatcatgcggcgtggaagttgtgcttattgtcatggcgttccgtcacccctcaaatttaagatgacgcgacaataaccacgattaacacccaatgcagcaggcagtttttatctttggacagcgaattcagaagtatttttagcggactgtaacttttacatttcagcggaagctgactcgcaaattccccatgaaaatactccggcagcgttagccaccggagaggaaattatttcaggcttcccttaaggaaccgttgcagacgagggctttgcgggttgccaaataactgctccggcgcgccctcttcttctattttcccctgatggaggaaaatgacatgagtagaaacatggcgagcaaagcccatttcgtgagtcactaccaccatggttttcccctcttctgccagttgctgcataatacgcaacacttcgcctaccagttcaggatcgagcgcgctggtaggttcatcaaacagtaaaacttccggttccatcgccagcgcccgcgcgatagaaacacgctgttgctgaccgccggaaagatgcaccggatatttcccctgcgcacgttcgtctatcccgacttttgccagatacttcaccgcccgctcgcgcgcttcctgcttgctcaggcccaacacctgaatcggcgcttccatgacgttttccagcaccgtcatatggctccagagattgaagtgctggaataccatcgtcaggcgtgtgcgcagtaagcgcagttgatttttatcggcgactttgagttgaccgtctttgtcgcgcaccagattgatcgtctggccattgaccacgatgctcccttcactcggtttttcgaggaagttaatgcagcgcagaaaggtacttttcccgcttccgctgcttccgatgatgcttattacatctccggcattcgcttgcagacttacccctttcagcacttcatgttcgccgtagcgtttgtgcaaatcgataacgtttaatttattctcggacatcgtattctcagtgcgtactagaaggtttcacatgctgcaaccagcgtttttccgctctgcgaaagaggctgatcaggacataagagatgattaaatagagcaccgcggcaatgccgaaggcggtaaaaggttgatacgtggcggcgttaatatcgcgggctattttcagcagatccggcaccgtggcagtaaatgccaacgcagtagagtgcagcatcaggatcacttcgttgctgtatgccggtaacgcaatacgcagcgcagaaggcaaaataatgcagcgatacattttaaaagtgctgaagccataggctctggcggcttcaatttccccatgcggaacgctacggattgccccagcaaaaatctcggtagtgtaagcgcaggtgttaagcgtcagcgccagcacggtacagttcaggccactgcggaagaaagcgttaaggaattcggttcccttaacaatctcaagcgtgtacatgccggaatagaacaccagcaactgaacatacagcggcgtaccgcgaaaaatataggtaaataaccagattggaaactggatgtatttattactggagacacgaccaatcgccagaaacagcgccaggactccgcctatcactacgctcaaaataagcagccacagagtgatcgccacaccagtaaagcgataaccgtcggtccacagcagcggtttccagtattcatgtaagatttcgatcacaggtcagccctcttcacacccacggagtagcggcgctcaaggaacagcagcacaccattggaaacagtggtgaaaaccaggtaaatcacgccacagacgatggcgaaatagaacggttcccaggtacttttgcctgccagttgggtggctttgaccacatcttccaggccgagtaagctaaccagtgcggtagatttgaggatcacctgccagttgttgccaatgcctggcagggcgtaacgcatcatgctcggaaacatgatccgccgaaacacttgcccacgagtaaaaccgaacgccgtcgccgcctctatatgtcctttcggcactgccataaaagcaccacggaacgtttcggtaaaataagcaccgtagataaaaccgagagtgataataccagcgaccatcggatcgatatcaatctgcccgacgcccatcgcctccgtcaccgtgtttagcgcaatctgcaaaccgtagaaaatcagcagcatcaacactaagtccggcacgccacgaatcagcgtggtgtacccttcgaaaatcagcccgctaagccgattttggctgagcttaccgccagcgccaattaaaccgatgattacagcgagcactacagagctgatagccagctccagcgtgacgagcgcaccctgtaaaataacaccactaaacccatacaacatgctgcctgtcctgtcgtgtgtggtgaattaccgcctcttgtctccctccggttacccgaagggagcgggctttctttcaccgatggcgattagccaccataaacatcaaaatcgaagtactttttcgctaatttctcgtaagtaccgtcagcgcgcatttcggcaaaggctttgttcagtgcttcgcgcagttcgttatcttctttacgcaggcccatgccggtccctacgccaaacagtttttcatctttaacagacgggccaccgaatttgtaatctttaccgacaggttgtttgaggaaaccttcgctggcagcgacctcatcctggaacgcggcatcaatacgtccggcagtcaggtcagaataaatgttgtcctgcccctgatagctgacgatttcaatgccttttggtgcccaatgttcattaccgaacgtctcctgggtggtgccctgcaatacgcctacccgtttgcctttcaggctctcgactgtcggctgaatgtcagaatttttcgccaccaccaaacgagaatcggcagcgtacagtttgtcggtgaaggctatttcttgctgacgtttttccgtaatggaaaggctactcatgatggcgtcaatcttcttcgcttttaaggacgggattaacgcatccagcggattttcgacaaacgtacattgcgtattgatgcgtttgcataattcctttgccagatcgatatcgaagccaaccagttcgccttgactatttttactttcaaatggcgcataggtcgggtcggtaccgatgcggatgttttgcggaatcgcagcaaacgccgcagttgcgctggagaaggccagaaccagagagaggcttagcaccagttttttcataatgtcctcaactgacagtctttttatagggaatatttacaggtttgttacacttatcgtgccataaaattgaccatcaaggcaaaatatcccgccccgttagacgtattatttttcattaaaaatgcttaagtatgcatttcaatgcaccacgatagtgcaacaaacctggcgtgcaccatgatgatcattccatcaggtacagcttcccagcgacgtatcagtcaccgtagacattaaagtcgaaatactttttcgccatcttgtcgtaggtgccgtcctgacgcagctcgccaagcgccttattgaaggcagccgtcagttcagcatcatctttacgtagccctacaccggtgccatcaccgaagtattttttgtcttttacactactgccagcaaaggcgaaatctttaccagcaggttgcttgaggaatccttcgctggcagcaacttcatcttgtaacgcagcatccagacgtcctgcagccagatcggaatagaccaaatcctggttggcataggccaccacatccacgcctttactacgccaggtctcgttagcgtaagcttcctgggtacttccctgcagcacaccaacatgtttacctttcagactatccagcgttggctgaatcggactacctttggccgcaatcaaacgagaatctgcggcgtacagcttgtcggagaaggcaatctcctgctgacgtttatcggtaatggaaaggctgctaataatagcgtcgatttttttcgctttcagactggggatcagcgcgtcaaagtcactggcaacccaggtacatttcacctgcatccgtttgcacatctcgttaccgagatcgatatcaaagccaacaaaatcacctttagcatctttgctactgaacggtgcgtaggtggtatcggttccgatacgtaccgtctccggtagcgccgcatagctggaagccgctgtggagagaccgactaacaaagacagagcgagaatgctcttcttcatacataaccctcaagtgaaaatggcttttttatgttgtgtattgtgttgtgtgtttgcaggctctttcatgcaggtcttatgccatcttgacgacaacagtaacattcaacgttaaatatgttaataagacgttgcattattgtcctgaagttgaagatagcaggtatagcggttgaatcgcagcgtttcgattgaatggcagaaacaaaatgtcgaggatttgatcgcggttgcaaaattgccctgaaacagggcaacagcggagttatgcgccctgccagcgggcaaagagatcttcaggaagggttatcgcaaactggtcaagaacacgattaaccgtctgatttatcacatcatcaagggattgcgggcgatgataaaacgccggaacgggaggcataatcaccgcaccgatttctgccgcctgagtcattaaacgcagatggcctaagtgcaatggtgtttcacgcacgcagagcaccaacgggcgacgctctttcagcaccacatctgccgcacgggtcagtaagccatcagtatagctatggacaatgccggaaagggttttgatactacagggtaaaatcaccatccccagcgtctggaaagaaccggaagagatgctggcggcaatatcgcgcgcatcgtgcgtgacatcggctaatgcctgcacttcgcgcagagaaaaatccgtttcgagggataaggtctggcgcgctgcctggctcatcaccagatgcgtttcgatatctgtgacatcgcgcagaacctgtaataagcgcacgccataaatcgcgccgctggcaccgctgatgcctacaatgagtcgtttcataaatagttgccctgtcagacttgcaggcagactttgcaggatttcggcgggagttgcaagtcagggtgccagaccggcaccctcagcgaaggcatcatccttcgttatgcatttcgagattttccacttcgttctgacgttgcactgctttggcgtcatcattacgtaacgtatcgaggaaatcgaggtagccctgatcaacatctttggtgacgtagacgccgttgaacacgctgcattcaaactgctggatatccggattttcagcgcgaacggcgtcgatcagatcgttcagatcctggaaaatcaacccgtcagcaccgatgatctggcgaatttcatcaacttcgcgaccgtgagcgatcagttccgtggcgctcggcatatcaataccataaacgttcgggaagcgaatttccggtgccgcagaagcgaggtacactttcttcgctccggcttcgcgtgccatctcgataatctgctcagaagtggtgccacggacgatggagtcgtcgaccagcaggacgtttttatcgcggaactcggcgcggttggcattcagtttacggcgcacggacttacgacgcagctgctggcccggcatgataaaggtgcggccaacatagcggtttttaacgaagccctggcggtacggtttgcccagaatacgagcaatttccagcgcgatatcacagctggtttctgggatcgggatcaccacgtcgatatccagatcttcccattcgcgggcaattttctcgcccagtttcgtgcccatattcacacgcgcgctgtaaacggaaattttgtcgataaagctgtccgggcgggcaaagtatacatactcaaacaggcacggattgctgaccggattgtcagcacattgacgggtaaacaactgcccttcttcagtgatgtaaatcgcttcgcccggcgcgacgtcacgcaggaaatcaaagcccagcgtatcgagcgctacgctttcggaagcgaccatatattctgtacggttctcgtcaatatcacgttttcccagtaccagcggacgaatcccgtttggatcgcggaaagcaaccataccgtggccgataatcatcgccacacaggcatacgcgccgcggattaagcggtttgtggcagcaatggcagcgaaaatattgtcggcttccagcgggtagtggcggaagttgtccagctcgctggcgaagatattaagcagaatttcgctgtcggaagtggtgttgatgtggcggcgtttttcttcaaacagttttttacgcaactcgtgagcgttggtcagattgccgttgtgggcaagcgtaatgccatacggggagttaacgtaaaacggctgcgcttcagaggcgctggagctgccagccgtggggtaacgcacatgaccaatgcccatattgccctgcaaacgctgcatatggcgagcttcaaatacatcgctcaccagcccgttcgctttacgcaaacggaagcagttattggcatctatggtgatgatgccggcggcatcctgaccgcgatgctgaagcaccgttaaggcatcataaatgctctggttaaccggcataacaccggcgataccgacaataccgcacatacgtctttttcctcgttaagccacatctcagagcacttacgctctgggcaagaaactactgctgctttgcagataatcaaaaaaacatctgatgataaaactgaattgcgggatcagctgacttttgctccagtcttcgcttttgctcaccccggtaaaggagtcgagaaagaagagaatggcagcaacaatcaacacaccgcgcaacgcaccgaaacagacgcccagcacccgatcggtgccactcaaccccgttttctccaccaactggcctatcacgaagttcacgatagcaccaacgatcagggtagcgataaacagtaccgcgatggcaatcccatttcgaaccagttcgtcttcaaagcccgtaaaccagacactcaggtaagtgtagtaatgactggcaacaaagaaagcacaaccccatgtcaccaggcttaacgcttcacgaacaaagccgcggatcaggctaaccagagaggaaaaagcaatcaccgcgattatggcgtaatcaatccagaccatatgtgtcccacgattttacgccctgtcatcctgttcggggcgcattctaacagaaaaagaaaacgtttgcgtagggatttccttcccgcgcatcaataaaaatggcgctgaaaaaatattcaacgccatcgactttttatgcctttgcggcatcgggcaatgcgtgtcggatgcggcgtaaacgccttatccgacctacggttctacccctgcgtaggcctgataagacgcgccagcgtcgcatcaggcaagaccgtattaattcggcgtatagcccattaccacgccacttaagccagaaagttgcttcaactcacccaggctacctttcagcttatctttgctggcatccggcccaaccagaatacgggtaattttaccctgcactggcgtggatgggctcgtataaacccgataaccggcaccgcgcagcttaccgacaatctcattcactttatcggcatttttcagcgcacccagttgcacaacataggctttacccgtcggtgcagctttttcttccacgaccggcttcggttctggcttcggcgcaggtggtgcttcaacctttggtttaggcggctccaccggtttcggcttcggtggggcgaccggtgcaggttccggttcaaactcggtgttattggctgcaatagtggccggatcgaggctcggtgctgcggcatcacctgcccgcacctcttccgctgcgccttccggcggctgcgtcggtaacgcctgggtggcggctggcatcatatcaggctcatcacgatcgcccgctttcggcaccagcgggatagccgcgaactcatcctgataatgttttttctgcccgtccagcagccctggaagtacaatcacccccagcgccaccagcacgatcgtgcccactaaccgattctgaaacttacttgccaccgcttctcctcgcgtcaatcacttccatgacatgtgcgaccgtgtggaaagaaccacacaccagcacggtgtcttccgctttagcgtccgccattgcggcatcccatgcctgcgcaacgctatcaaaacttttgccgttacccaaatgctcaagcagttgttctgccgtggcaccgcgcggcccttccagtggcgcacaataccagtcatcaaccacgcttttcaaccaggccagagttccggcaatatctttatcatgtagcataccgataaccgccagcacgcgcccgtttttcggtagcgctttcatacgcccggtgagatattccgccgcatgtggattatgcgcgacatcaaaaataacgcgtgggctctcgctcacaatctggaaacgtcccggcaaaattgcgctggcaatcccgtcgcgaatggcattttcactgacttccagcccgctggcacgcagtgccgccagcgctgttgcggcattcggttgcgggacaagcggcaacggcagattttccagcgtgccgtgagcatcgctaaacgcccagtcatgatcggtgacggaatagttccactcaacgccccgacgttgtaacagtgcacctttttcctgcgccacatcagcaatggtagaaggcatttccggctcaccgacaattgccggtttttcgctgcggaagatgcctgctttctcgcgaccaatactttcgcgatctggacccagccagtcggtatgatccagcgcaatactggttactaccgcgacatcggcgtcgacaatattggttgcgtccagacgaccgcccagccctacttccagaatcaccacgtcaagttgtgcctgcttgaacagccacaacgcgctcagcgtaccgtactcgaaataggtcagggaaatatcaccgcgtgcgctttcaatctccgcaaaagaggcggtgtgggcgctttccggcaattcctggccctgcacacgtacgcgctcggtataacgcaccagatgagggctactgtagacgcccactttgtaccctgccgccatcagaatgctctccagcgtacggcaggtggtgcctttgccattcgtacccgcaacggtaaacacaaatggcgctggtttcaggacgccaagacgcgccgcgaccaggctcacgcgctcaaggccgagatcgatagttttactgtgcaggttttccagataagaaagccagctagccagagggctcgcggcttgaggagtgcgtttgataatcatggtatccgctgattcgttacggtgagaatagcaaaagggcagagccagtggccctgcccttatcagttatcaggcctcaggttcctgatccggtaccgggggtaccactacgccttcacgcggcgcttcaggattcggcgctggcagattcatcaacttcgccagaatgctcgccagtttcaggcgcatttccggacgacggacgatcatgtcgatcgcgcctttctcgatcaggaattcactgcgctggaatccaggcggcagtttttcgcgaacggtctgttcgataacacgcggaccggcaaagccgattaacgctttcggttcagcgatgttgagatcgcccagcatggcgaaacttgcagaaacaccgcccatcgtcgggtcggtcagcacggagatgtacggcaagccgcgctcctgcatttttgccagtgccgcagaggttttcgccatctgcatcaggctcatcagtgcttcctgcatacgtgcgccaccagaggcggagaagcagatcagcgggcagttatcttccagcgcctgctcaacggcacgcacgaaacgtgcacccacaacagaccccatactaccgcccataaaggcgaactcgaatgccgcagcgacaaccggcattccatacagagtgcctttcatcaccaccagcgcatctttttcgccggtttctttctgcgcagatgccagacggtctttatacttcttggagtcacgaaacttcagcacatctttcggctcaagctcgctacccagctccacaaggcttccttcatctaacaggctatgcaggcgattacgcgctgtcatacgcatgtgatggtcacacttcggacagacctcaagattacgttccagctcagcgcggtataaaacctgaccgcagctatcacacttagtccacaccccttcaggaatgctcgccttgcgggtgggagtaatgttgcttttaattcgttcaatccagctcattagggacctttctgtctgaacctggttcgatgccagttttatctttggggacgcataatgccatttttgcccccaacagaccatgaatgttgcacattaaaacataacagcccgaaactttggataaaaaagtggtcgaaccgcggagttactttttattttgcggcgcgtgccgcagcgcgtttgtgacggattatttcgatgacgcccggcaaaatagaaaccacaataatcccgacgatcagcagcttaaggttatcctgaaccatcgggattgtaccgaagaaatagcctgcgtaggtaaaaagcagtacccacaacagtgcgccgatcacgttataagcggcgaaatgacggtagctcatgtggcccattcccgcaacaaacggggcgaacgttctgacgatcggcacaaaacgggcgagaataatcgttttgccgccatgtttctcataaaactgatgggttttgtcgagataactgcgacggaaaattttgctattgggattactgaacaacttttcaccgaacaaccgcccgatagtgtaattgaccgcgtcacccacaatcgcggcgatcagcatcagcaccaccatcatatggacgttgagatcgttggtttccagacttgccaacgctccggcaacaaacagcaaactatcacccggtaaaaacggcgttaccaccagaccggtttcacagaacaaaattaagaacaaaatggcataaacccagacgccgtactccgcgaccagctctgccagatgcacgtcaatgtgcaggataaaatcgatgaggaaataaatcaggtccatatttgcctatgccttgtactcgtcatctttcaggctgtaactacgttggctacagcctgaaatgttccgagcattattctcgttagtccgccagaaatagcgggcccattggcggttttggaagatcataccggtcagggtaatccaccgcgaccagatacagcccttccgcttttgccgttgctgccgccagcgttctgtcctttgccgccagcaactctgctatccagctctccggctggttgtgggcaccgacttccatcaggctgccgacaatattcctgaccatatgatgtacaaaagcattcgctttaatatctaccaccacataaggaccgtgacgcgtgacattaatatgcataacgttgcgccacggggttcgggactggcactgcaccgcacggaagctggtgaaatcattctcgcccagcaagcattgcgcagcccgatgcatccgttcagcgtccagcggttcgtaaaaatgggttacccctttactcagtaccgccgggcgcagccgatgattgtagatgatgtagcgataacggcgagccgtggcgctaaatcgggcatgaaaatcatcaggtacagttttaacccaacgcacagcgatgtcaccaggtaaattcgcatttacgcccaaggtccacgccgcgtctttgcgcagcgcggttgtttcgaaatgcacaacctgcccggtaccgtgtacccctgcgtcagtacgcccggcgcagaagacggtgatgggttcgttcgccacctgggagagcgccttttccagcttctcctgcacactgcggacttcgttctgccgttgccagccgtaatacttactgccgtcgtactcaatgcccagcgcaattttataaactggcggttgttgctggtcggacattagtacagatactcctgcaccagtttctcggcgatttttactgccatcagcgcgccgccaaagcgaacgttatcggccacgctccagaactggacttgctccggcataccgtagtcattacgcacgcagccaacagaaagatgcggcgtaccgctagcatcacctacctgagttgggaattcgttctcttcagagagcacaatatcttcgccttgaacaaacgcatcacgcgcttcttctgctgccagtggacgcagagcttcaaagttgaccatctgggcatgaccgtagaataccggtgcctggacgacgctagcgctaatcatcagcccttcgtcctgcaggattttgcgtacttcgtcaacgatacgacgttcttcacgcacgctaccttcgctatccggcagtaacggcagcatgttgaacgccagctgacgcccgaagaaatcttcttcgtcaatcggaatgccgttgagcaatttcgcactctgccccgctaacgcatcgaccgcttttttgccctgggcggaggcactaatcaggctggtaacgctgatacgacttaaaccgccctgatcgattaacggtttcagtgccgccagcagctggctggtcagactgtctggtacggcgatgacattccggttccggtaatctgtcagtacaaacgggtttacttccggcaccaccagcggtacgtcgggttcgagagcaaacaatccactgctgtcgatcaccaggcaaccactgttggtcgcttcttcaacccaggcagcggtagcttctttgcctgcgacaaaaaatgccagctgcgcctgcgtccagtcgaattcagcggcatcctgcacggtgattgtcttaccaccaaagcgcagttgttcgcctgcgctttcgttacgtgccagtgcataaatttccccaaccgggaactgacgttcagccagcgtttcaagcagggcttcgcccacagcgccagttgcgcccaggacggcaatgttccagccttcagacatggtggtttactccagaaatagcaaagctccctgccaatgttacagcagagagcatgaagaagagattaacgtgccggatgatgaacggcgttaaaacccagtttacacagcaaacttgccgcactggcgtcatcacaaattacatacagagaactccattcacggcgctcaagatagtttttgcgcagtttatcgaactcacccggtatcccggcgactttacgcagcggtgcgtcatcgcggcgcacatcatacaccaaatgcaccagccttttcagcgtcggttgatcgagcgggccatgcagcgtaatgcgaccaaactctggcgcaggcagtaatgtatccagcgcaacgtgctgttcatgcccaataaacttgctataagcttcaaacacttgcgtagtaccgcgtgctttaccttccagggtatagcctgcgatatggctcgtgccgatatccacttttttcagcagctcgacgttgagttccggttcgccttcccagacatccagcactacgcttaacttctggccttcattcaggcaggtcagcaacgcagtattatcgacgactgcgccacggcaggcgttaatcagaatcgctccgggcttcaggctacggatcagtttttcatccgccagatgtagcgttttgtacggaccatctttaaagagtggcgtatggaaagtcagaatatccgcgcgctggactaactcatccaggctgcggaaatcaccctcatccccacggtcggcgcgaggcggatcgcaaagtaaggttttaatccctaacgcttccagtcgcgcctgcaatcgacgtccaacgttaccaacgcccacgatccccaccgtacggtcgtacagactaaatccatcgcgttcggcaagcatcagcagggaggagaaaacatattccaccaccgcaatcgcattacagccaggtgcagcggaaaaaccaattcccgcctgcttcaaccatgcttcatcgacatggtcggtccccgcagtggcagtgccaacaaatttaatgggttttcctgccagcaaagattcattcactttcgtgacgctacgcaccatcagcgcatccgcgtctgccagttgagcgacggggattggacgcccgggaaccgcggtcacctcacccaaacggctaaataagtcgcgggcataaggcatattttcatcaacaaggattttcacgtttgtgttacctgtatgagacgagagttaaccggacaagtgtgccataatctcgcggccaggcatacttgcgaagatttcaggtataaggatacgtaatgatacaacctatttccggccctcctcctgggcaaccaccaggtcagggagataatctgccgtctggcacgggcaatcagcctttatccagtcagcaacgtactagcctggaaagcttaatgacgaaagtgaccagtctgacgcaacagcaaagagcagaactgtgggcgggtatcaggcacgatattggtctgagcggagatagtccgctgcttagccgtcacttccctgccgctgagcataatctggcgcaacgtctgctggccgcgcaaaaaagccattctgcccgccagcttttagcgcaattaggggagtatttacgtctggggaataatcgtcaggcggtcacggattatatccgtcataactttggtcagacgccgctgaatcagctcagtccggagcaattaaaaaccattctcaccctgttgcaggaagggaagatggttattccgcaaccacagcagcgcgaggcgaccgaccgtcctttattaccggcggagcacaatgcgctaaaacagctggtgaccaaacttgcggcggcaacgggggaacccagcaaacagatctggcaaagcatgctggaactttccggggtgaaagatggcgagttaattccagcgaaactgtttaaccatctggtgacctggctacaggcgcgtcagacgctaagccagcaaaatacgccgacgctggaaagtctacagatgacgctaaaacaacctttagatgccagtgaactggcggcgttaagcgcatatatccagcaaaaatatggtctttctgcgcaaagtagcctttcttctgcccaggccgaggatattcttaatcagctttatcaacggcgggttaaagggattgatccgcgtgttatgcaaccgctgcttaatccttttccaccgatgatggacacgttgcaaaatatggcaacgcgtcccgcgctgtggatactgttagtcgcgattatcctgatgctggtctggctggttcgttaaccccgacgaaaactcagtatcgtgacaataatacccagcaccgcagagatcgccccggcaagaaatacgctagagtaaccaaacgtggtcgccagcattcccgccagcggcccggagacgccgagggcgatatcctgaaacgcggcgtaaccgcccagtgcggtgccgcgaacttgactggggacgcgtttaaccacctccacgcccagcgcaggaaagataaggctacatccggctccggttaacgccgcgcccgctaatgcgacccatgcacctggggcttgccagagcagcaacaagcccaccgtttctacaagcagagagacaatcgccactttcacgccgccaaaacggtccggcatccagccaaacatgacgcgcatcacgacaaatgcgccgccaaacgcggtaagagtaaagcccgccatcgcccatcctttgctggcaaagtagaggctaacgaaagtcccgataacagcaaaaccaacgccttgtagtgccagacctaaccctggtttccagataagcccgacaacgctccacaggcttggacgttctcccgccagggccggtactttgcgcactgtgccgttacaggcccacgccagtacgggtaataccattgtggtgatcgccagtgcggcaaaaccgtaatggctatgaatcaacaggccaagcggagcaccaacagcgagggcaccgtaaatcgccattccgttccaactcatcactttgccagagtgttttggccctacgatgcctagtccccaggtcagagcgcctgtcagtaactggctttcaccaaagccaagaatcaaacgcccgacgaccaacagagcaaatttgaacggtgcggagacaggcaaaatcgccgccagcagcaacgcgccgccagccagaccacaagctaacattccctgaagcgcgctacgttttgcaccatattgatcggccagtcgcccggcgtaaccacgcgtcagcaccgtagccagaaactgaatcccgacggcaatgccgaccatggtattgccatagcccagttcatgatgaacaaacagcgggataaccggcaacggcaaccctacggtcatgtaggtgagaaaaaccgcaaaagcgatgcggaagaggctaaaattggcagaagatcgtgtttcggtttggcttacagcagtcatgcattactccagaatgcagcgcaaggcgaggagtatccccgtctcatctctctggtttcagggttacggtgcgttggcaggatttaacgcgtacgtcttttcagaaggaaatcgacaaagcgggaagtttgcctggaactggcggcgattgtcaatgatgtgaaaaagggaaccatcaggttcccttttgcgttagtgccggaggccgcattggcgcgtaacgtcggatgcgacgctggcgcgtctactccgacctactgcgaattaatctttcagcttgcgcattaccagcgtggcgttggtgccgccgaagccgaagctgttagacataacggtggtcagttcgcgatcggtcgtttcggtcacgatgttcagacccgcagcctgctcgtccagctcttcaatgttgatgctcggggcgataaagccgtgttccagcatcagcagagagtagatagcttcctgtacgccagcagcgcccagagagtgaccggtcatggctttggttgcagaaatcgccgggctcttatcgccgaacacttcacggatagctgccagctctttcacgtcgccaaccggagtgctagtaccgtgggagttcaggtaatcgattggggtatcaacgccatgcatcgccatcttcatgcagcgtactgcgccttcgccagacggagcaaccatgtctgcaccatcagaggttgcgccgtagccaacgatttcagcatagatgtgagcaccacgcgccagcgcgtgttccagctcttcaaccactaccataccgccgccgccagcgataacgaaaccgtcacggtgagcgtcgtaagtacgggaggctttttccggggtgtcgttgtatttagtagacagcgcacccattgcgtcgaattcgcaagccatttcccagcacagctcttcgccgccgccagcaaacacgatgtcctgtttgcccagttggatctgctctactgcgttaccgatacagtgtgcggaagtcgcacacgcggagctgatggagtagttaacgccatgaattttaaacggggtggcgaggcaggcagaaacgccggatgccatcgctttggtgaccacatacgggccaaccgctttcaggccgcgcgggccgcgcattgcgtcagcgccgaacacctggaaacgcggggagccgccgccggaacctgcaatcaggccaacgcgcgggttattctggtaagcttccggagagaggcccgcatcagcgattgcctgctccatagaaaggaatgcataaatggatgcgtcgctcataaagcgcacaactttgcggtcaatgaggccagtggtatccagttttacgttgccccagacgtggctacgcatgccggaatccttcagctcctgagagaaagtgatcccactacgtccttcacgcagagatgccaggacttcctgctggttattaccgatgctggaaacaatgcccaggccagtaatcactgcacgtttcattcaatacctctgtaagtcgcacatagagtaagtttcgaatgcacaatagcgtacacttgtacgccgaacaagtccgatcagccatttaatagagaaatttgcgcagccttacacacatcgctaagatcgagccaccgcctgtaagacgagtaacttacgtgaaacactactccatacaacctgccaacctcgaatttaatgctgagggtacacctgtttcccgagattttgacgatgtctatttttccaacgataacgggctggaagagacgcgttatgtttttctgggaggcaaccaattagaggtacgctttcctgagcatccacatcctctgtttgtggtagcagagagcggcttcggcaccggattaaacttcctgacgctatggcaggcatttgatcagtttcgcgaagcgcatccgcaagcgcaattacaacgcttacatttcattagttttgagaaatttcccctcacccgtgcggatttagccttagcgcatcaacactggccggaactggctccgtgggcagaacaacttcaggcgcagtggccaatgcccttgcccggttgccatcgtttattgctcgatgaaggccgcgtgacgctggatttatggtttggcgatattaacgaactgaccagccaactggacgatagcctaaatcaaaaagtagatgcctggtttctggacggctttgcgccagcgaaaaacccggatatgtggacgcaaaatctgtttaacgccatggcaaggttggcgcgtccgggcggcacgctggcgacatttacgtctgccggttttgtccgccgcggtttgcaggacgccggattcacgatgcaaaaacgtaagggctttgggcgcaaacgggaaatgctttgcggggtgatggaacagacattaccgctcccctgctccgcgccgtggtttaaccgcacgggcagcagcaaacgggaagcggcgattatcggcggtggtattgccagcgcgttgttgagcctggcgctattacggcgcggctggcaggtaacgctttattgcgcggatgaggcccccgcactgggtgcttccggcaatcgccagggggcgctgtatccgttattaagcaaacacgatgaggcgctaaaccgctttttctctaatgcgtttacttttgctcgtcggttttacgaccaattacccgttaaatttgatcatgactggtgcggcgtcacgcagttaggctgggatgagaaaagccagcataaaatcgcacagatgttgagtatggatttacccgcagaactggctgtagccgttgaggcaaatgcggttgaacaaattacgggcgttgcgacaaattgcagcggcattacttatccgcaaggtggttggctgtgcccagcagaactgacccgtaatgtgctggaactggcgcaacagcagggtttgcagatttattatcaatatcagttacagaatttatcccgtaaggatgactgttggttgttgaattttgcaggagatcagcaagcaacacacagcgtagtggtactggcgaacgggcatcaaatcagccgattcagccaaacgagcactctcccggtgtatagcgttgccgggcaggtcagccatattccgacaacgccggaattggcagagctgaagcaggtgctgtgctatgacggttatctcacgccacaaaatccggcgaatcaacatcattgtattggtgccagttatcatcgcggcagcgaagatacggcgtacagtgaggacgatcagcagcagaatcgccagcggttgattgattgtttcccgcaggcacagtgggcaaaagaggttgatgtcagtgataaagaggcgcgctgcggtgtgcgttgtgccacccgcgatcatctgccaatggtaggcaatgttcccgattatgaggcaacactcgtggaatatgcgagcttggcggagcagaaagatgaggcggtaagcgcgccggtttttgacgatctctttatgtttgcggctttaggttctcgcggtttgtgttctgccccgctgtgtgccgagattctggcggcgcagatgagcgacgaaccgattccgatggatgccagtacgctggcggcgttaaacccgaatcggttatgggtgcggaaattgttgaagggtaaagcggttaaggcggggtaatctgctctcgcagtgtttgccggatgcggcgtgaacgccttatccgacctacgtgtgacgtgtaggcctgataagacgcgataagcgtcgcatcaggcatgctgctccagacgccgcaacttactgctgactcgcctgctgaaacaggttttcccacatatcggtcaccagcgcctggtcacgcgggctcaattcaccagcaccaatggctttttccagactctggctaacggtcgtatgcaccgcctgagcggagtggtcatcaccactttccagttctgcgatggctaatgtcaggtggccacgcaaatacccactggcaaacaactcatcatcactggcatggtcaaccataccgtcgattaatgccagaatgcgactttcaaactccgcgatcatcttctttcctcattgtaaaacgtggcgctggcttcagttgagcgcttccggccacgggaactgttccgccgtaagttccggcgtgtgataataattttgtagtgctttaatgaagcgtgccggacgttccggaatgccatttgtcagataatccatcacctgcgcatgtactcgccgttgaaacaccacacgatccggttcgaaatccccttccagattgtcgcaactgacgttaaacggatatcccgccgccacacagaacaaccagtcgagcgcctgcggcttcacttcaacatcttcaaactggctttgcgtttgggcatcgcgtccgtccgggcaataccagtagccgaaatcaaccagctcacggcgcgctttcccggcaatacaccagtggctaatctcatgaattgcgctggcataaaagccatgagcaaagacgattcggttatacggtacttccgcatcagcaggaagatagatcggttcgtcgtcgcctttaatcagacgggtattaaaatcatcggcaaagcagctattaaaaatttcaatcaactgctcgtagtggtgtgtactgttcattagttcatccccaaccagtggaggatctcctgtccgtggctgtcgtaaagtaatttggcactcatcaccgcgctgacgataacaatcatcgggcggatcagcttttgtcctttgctcaacaccagtcgactacccatgcgcgcgccgaggaactgccccaccagcatgacaaagcccgtcgcccaaatcactttgccgccgagaataaacagcagtaaaccgccgatgttactcgttgcgttgagtaatttggcgtgagccgtggctttggcgaggttaaatccgcacagcgtaacgaaggccagcgcgtaaaagctcccggcagccgggccaaagaatccatcataaaaaccgacgcagccaccggctattaacgcgaagggtaaaccgtacatccggcgctggcggtcttcttcacctagctttggcatcagcaagaaatagaggccgatacaaattaccagaatgggcaaaatctgccgtaagacatcagcctgaacgtattgcaccagcagtgcgccgctcatactgccgacaaaggtcatggcgatattgagtttctgatcgcttaaactaaccactttgcggcgaataaagtagatagtagcggaaatagagccgccgcaggcttgcagtttattggttgccagcgcattagcgggagacatccccgctgccatcaatgccggaatggtgagtaacccaccgccaccggcaatgctgtcgataaatcccgccagcatggcgacaaaaaagagaactcccagcaacagcggggaaaccataaacaggctattaaacgtttccattagatcacgtgctcatccagtagcgcctggcaggaaggcggcaacggaggcggtgtcttcttctcaggctttgttgttcccggttttggaggttcaaaccagctttgcagttctgccccgcaaccatcgccacttggcggtaaaggttgatcttcacactccagactatcggcagggcaacgtaatcgtacatgcatatgcgcgcgatgctggaaccagggtcgcactttgcgcaaccagtcgcgatcggtgcccgcatcaaggcaaagttgttgtttaatcgccggattaacaaaaatgcgcgtgacgtctttgtcctgggcggcgagtttgatcaagctgaaaatttctggcttccacagcgtggagacaacgtgtttaccgtcgcgggaaactaagtccagtgcttgcgggcgcaagagctgcgcggaggtccagcgagttttcggcagttgcagaaagatatcgacatccagtccggtctggtggctggcatgaccgccgttgaaacgcccaccagcgggcatccccatatcgccaatcagcaccgtacccatgcccagattgctcacctggctactcagacgctggataaacatcaccagatccgggtgaccgaaatagcgacgctgatcggtacgcatgacctgataatgttcggactgtatcggcagcgtgtcagcgccgacaatacagccattagaaaaactgcctatgctttgtgcgctacccggcacaggttgggttattttttgccacggcgtcgctgccaggctggcgctactggcaagcagagccagcagcgcaatcgcggttttattcattttttaccagcgtggaatatcagtcttcacatcggcattttgcgcccgttgccgtaacaggtgatccattaaaacgatcgccagcatcgcttctgcgatcggcactgcgcggatcccgacacagggatcgtgacggcctttggtgatcatctcaacttcttcgccaaagcggttaatggtacgacccggcacggtaatgctggaggtcggtttcagcgccatatgggcaatgatttgctgcccgctgctgataccgccgagaatgccgcccgcatggttgctctggaaaccgtctttggtgatttcatcgcggttctggctgccgcgcagcgccaccacgtcaaagccgtcgccaatttccacgcctttcaccgcgttgatgctcatcagcgcatgggcgatgtcagcatccaggcggtcaaagaccggctcgccaagtccggcaggaacgccactggcaacaacggtgactttagcgccgatggagtcgccctcttttttcagcgcacgcatcaactcgtctaacgcgtcgattttgtcggggtccgggcaaaaaaacggattttgctcgacctggctccagtctttgatatccagcggaatgtcgcccatctgggtcaggcagccacggatttcaataccaaatttctcggcgagatattttttggcaatagctcctgccgccacgcgcatggcggtttcgcgggcggaagaacgtccaccgccgcgataatcgcgcagaccgtatttttgttcgtaggtgtaatcggcatggcctggacggaaaacgtccttaatcgcactgtaatcctgagagcgctggtcagtgttttcgatcaacaagccaatgctggtgccggtagtaacgccttcaaaaacaccggagagaattttgacctgatccggctcgcggcgctgggtggtatagcggcttgtcccagggcgacgacggtcgaggtcatgttgcaggtccgcttccgtcagcggaatgcctggcggaacaccatcgacgatgcagccgagcgccagcccgtggctttcgccgaaggtggttacgcgaaagagttgtccaattgtgtttccagccatcacggctccgttattgttgtgtttgcgtgtttacttaatctttataaatcgcgaaatgttctcgtgcggcaataagctgctctttggtgagcataaacacaccatcgccgccgttatcaaactccagccaggtgaacggaacatccggatattgttccataagatgtaccatgctgttgccgacttcacaaatcaacacgccatcatcagcaaggtaatctgccgcgttaccgagaatgcgacgcgtcagtttcaggccgtcagtgccagatgccaggcccagttccggctcgtggcggtattcgtttggcaggtcggacatatcttccgcatcgacatacggcgggttagtgacaatcaggtcgtactgcactttcggcaagtcgcggaacagatcggaacgaatcggaatgacgttgtggatcagaccgtgttcttcgatgttctgttcagcaaccgccagcgcgtctggagagatatccaccgcgtcgacttctgcatccgggaaggcataagcacaggcaatggcgatgcagccgctaccagtacacatatctaaaatatgctgcggttgcttgctgataagtccggcaaatttattgttgatcagttcaccaatcgggctgcgcggcaccagcacgcgttcatcgacgtaaaattcatggccgcagaaccacgctttgttggtcaggtaagccaccggaatgcgttcattgacgcggcggatcacgcgttcaacaatacggtgtttttcgctggaggtcagacgcgcggtgcgcatatcttccggaatatccagcggcaggtagaggctaggcaacaccagctgtacggcttcatcccacgggttatcggtaccgtgaccgtaccagatatttgccgcgctgaagcggctcacgctccagcgcaacatgtcctgaatggtttgcagctcatttactgcttcatcaacgaaaattttatccacgtattcctccagggcatgatcgcaataatttcggcggctagtttgccatgaagatgacgataaatcagcattcacgcgcggtgagtgaggaaaaatacgtttaaaacgatcgattgcgctacgagtcgggtaaactgtaggaaaattagaaatagagacagataaatgaaaaagaaaacaacacttagcgaggaggaccaggctctgtttcgccagttgatggcggggactcgcaagattaagcaggacacgattgtccaccgaccgcagcgtaaaaaaatcagcgaagtgccggtgaaacgcttgatccaggagcaggctgatgccagccattatttctccgatgagtttcagccgttattaaataccgaaggtccggtgaaatatgttcgcccggatgtcagccattttgaggcgaagaaactgcgccgtggcgattatagcccggagttgtttttggatttacacggtctgacgcagctgcaggccaagcaggaactgggggcgttgattgccgcctgccgccgtgaacatgtgttttgcgcctgcgtgatgcatgggcacgggaagcatattttgaagcaacaaacaccgctgtggctggcacaacatccgcatgtgatggcctttcatcaggcaccaaaagagtatggcggtgatgcggcgttgttggtgttgattgaagtcgaagagtggctgccgccggagttgccctgaggagttgagcgcgttgcgccaggtacgggtaatggcaggggcgaatgcccctgcctggtgtatctaagggttacaactcattcagtatgtactggaaccggcaagtagaatcgattggctgcatactgctggtatcaacacgcacgaccatatcgtgtaactgtttgtccgttatagggtgtcgatttggcgtgacgctgacttccgccttgtcacatccgctcgcggtaaaagttatcatctgtgcaacccagcggcagtaaccacctgtttcattcatctgcgtactgtcgcacaacttcccatctttcatcaaatacgtactaagcgttttctcaaccacaccgcccgtgctctgcagggtgagcagtttactcttactgacataattctcattccaactaacgtcataaggttgaacagaaacggatggacaaatcgtgtcgtgactatcaggcccctgatacgtcacgccccctggagaggcttcagagtcattcataataaccaaccatggacaagaaaagtaagattcaatctctgcagagacaataacctcaaatgtataatacccgcagttccacccagacggtaatccaggacaacttgctttgttgatattttgatggtagccaatcagcttaacgctaggggcaggaggaggaccactccagctcacattttgcaatatttccccagtcatgagccattgactacttttatattcaccaacgtacactgcggatggcatcattatttttaaattaaaagtcgcaatattacggctatcaccgttgtaaccgtagtaaacgtcaacgctatgcccggcagccatagcttctgtagtagcaataagcatgaccagagcgaacaaccatcgtagtattttcattttaaatatactcaaatgtcgcagttaaagaggcggtaaattcaccgatcgtcacatcacggccgcttttcgcctgtagccaggctctgaaattgatatcgttattgccattggttagcgcaaaggtcgccccatttgtattgttgatggcaacctgcattccgtcggttttttccatgccaattcccactccctgagcggtactactcgtatccagtgccagaaaaccgggttgttcgctgtcttctacccccgtgagcgtgacttttacgttgtatcccgccggccctttgcaatctttcagcttaaagactacgggtacacgagcggactggcctgcaacgttcaaatcctgacgactgaccgtgggaaagcgcacctctgccagatattggccatccaccaccagcgcacaggatttacttaataaattaccggagaaatgcagattattatctgccgcgaataacgtgctactcattgccaatatcagccccgctaacaggacgtaaccaccggactgaatcatacttttattcattgataatccacccgtaatgttgcgtaagcgctaaaattcgtatcgcttaacacagcatcactcgcttttaccggtacggcctccagcttcggcttttgcgtaaaatcagtggcgttgatagcaagcggagtattgagtttaaaacgctgaccatcgtgctgaagctcgataccaaaaccgggtacatcagtttcaattgctgcatcattaaaactggtttgtgtaccagtccaggtgagggtcatctcccaatctggatgacgggtcgtgctgtcacaagtgagttcatatggcacctctttacgaccatagttgccgttgatgtcgtcgataatgagatcgcgaaattcgacttcaatggttttaccaccgctgatgctacaggttggcggactcaataatgtcccgtgaaaggtgatgtcttcatcagcagcatgagctatggcgctactgacacaaagcagggttaagaaagtctttctcattgatagtccaccaccatggtcaaactggcgttaaactcgcccgcagcaagttgcgccccgcttgccttcacaggtacagccttcaactgtggctggttattgatattaaatggcgtccagctattttcaccgacggcaaacaaactgttatcggcgctattttctatccgaatgcccagcccggtgatattggtactgagtaccgtttcgccgttaatcgtactggtattgcccttaagttgcatccgcaagtcgttagcaagactgtttgtgcagttcaacgtgtatttcgcatcttgccgataattggtgccatcaacgttatcagcaatcatattgccgaactctacctggctgcccttgatactacagggtggcggagcatcgaccaacacgcgcagaattaaatccacgggtttactaccagccatagcagataaactacagacactgcataccagcagccctgcgcccactacaaacttttgactcataactccccccgtcatcagcctttgcggctctgctcttcatccacctggcagctgttgccattgcactggaagaacagcggcatccgtgcgccaaagtcgttgacgtaagtcagcaccggtacgctatccattttcacattcagcggtaccgtggttttcggctcaatgaccagagggctgaaccctgcagctggattaccgtttttctgcgcactggcgttgctgataatcacgtagtacggcgttgggttattgacggtaaatgcctgaccgctgcgggtgagcgtcaccttgtgctgccacggacttttcatactgaccttttccagcgcctttggtcgccagaacaacttgatacgcgtttgcagcgcgatttgcagggtattgggtttgttactttttggcgggatctcgcgcacgttaaagtagaacatgctttcacgatcggctggcaatttgttgatatccggcattccctgcacttttacctgcccgttcatcatactatcgatgcgttgcactggcggcagcacagttaacgggctggtgatcttgttacccttttcatcttcaatccagctttgagccagataagggagtttcggatcgttattacgcagcgtcacgctgatacttttgtcgctttcattaaatatcaaacgggtacgatctggcgttacagacgccagggcagacaaactggtagcgctaagcagtaacgccagcgtcatagcacccaatttggcagagcaaagtaaatcagacatggatcattccttaatcacgttattggttagcactaacagaaacagggggatcggtgggtgtcacctgttgcgtctgctcctgaatgacaggctttatgtcatcaggaacaaccggcgcgacgttgcctttatgctggcatggcagtaacaagccgttaaacagatcggcaggcagcgggtccggcaggttgatatcgcaatgcgcaacaccactccagaacacactcatatgttcgccaggtttcaccccagccagatagacactaccgtcatcatcgacaaggcccactgtctgctcgttatcattttttacttctgcgccaaacggtggatggctgccatcttgtaaacgcagcaccgccatcgctttttgaccactgatgacggcaaatttgcggtagccaatggctccttcagttagcgtggcttgcaccacgctctgggttgcttcggcgttttccggcaatttgttgaggtcgatatacgcctgattgcgataataattgttaacgtcagaaacgacggctttaccaaacatattggtataaacagcagccccgttaccttccaccggaacatcggcaacgccatcggcatcaatcagcaggcgtgtcccgcccatattctgggtacggtgaagtgcgccgccgtgggtagtaagcgttgcgccgccctgtaagctcaagcccgcagaggtgtattgcccttcatggtagttcgcactgaggtcaacctgcgccaggctaccatcatggctgtagtagccatcaacgctggtgtgtttgtcactggtgccgatgttcaactgatagtgagtcgcgtcatcgacacggctaaaataaccgacctggctgctgtccgtcccactgccatagttgccgttatagctaacggtactgttgtcgccccacggcatactgagcgaaatttacatgcccttatccgcccggttgtcatactcgtagcggtagccagtcagggaaacgctcatattacgaatgctgcccatattgaaatagtgggagagcatgatgttgtagtttgtctgctcctcacgatcccagtaggtatggcgggtatagttgagataaacgctaacacccgcatcgcggaagttctggttataagtggcggtgtacatctctttgtcgttgcccgtacggaccatttcgctgtcactggcatccagatactcgctcatggtcataaagttctcttcgctgaagcgatatccagcgaaagtgacgcggctgttgagctggtcaaagtctttggaataactcacacggaaggagttaccgtccaggctacctttgccataagcggtgtctttatccagtttggtatggctatgagtaacatcaaacgcgaccgcgccgaaggtagacaaatcgcgaccgacgcccagcgccgcagactgatagttttcatcacccagcgcaccgccatataagctccagccgttagcgatgccccaggaggcttcagcaccagagaaaaatcccccctcgacatggtggccccactcttgcggacgtcccatcatgatcttatagcgaacctggcctgggcgagtgaggtatggcatgctggcggtgctgatgtcatattcctgcacctggccgttctgttcttcaatgcgaatatgcaacgtaccggagacggaatcaccaagatcctgaatacgaaacggtccagccggaacctgcgtttcgtaaatcacacgccccatctggctgacggtcacttttgctgtggtgtgtgccacgccggaaatgtctggcgcgtagccgcgcagattgggaggcaacatttgatcgtcagtgctgacactgccaccaacataattaaaaccgtcgaaaatatcggaattgaggtaatcttcgcccagcgccagtttggcttttaaactcggtaacgcccgccaggcataatagcgactccactcccattttttttgtgtgtcatcgccgccaaattcatcgtcatcatcattactgcgcgtatgttgatagttggtctgccagtcagcgcgcatacgccatggccccaggttaaccccgaccgtcccgttgccgctgatctcgttactgtcatcgccgccattttcttcgtgtcgtgtttgcgcagtgatgctgtagtccgcaatgatcccggagatgccatcatcccaacgagaaggtggatcccagtcgggccaggtatattcgaggtaagcctgcggtagactaatgactaatgcggactggcttaaatcagccttaatttccacgccttccagttgaccgggcttcaggcatttaccatcgtggctccattgcagatttttcgccacgtcttcttttaaaccaaactgcgccaccagttccggtgtcagacaagcatagcttttgctaacgtcatcttcaccagcataccagtaaatatcgtactcttccgccaatggctgtttatttagttgaacctgtaaattgtattttccgggctcaacatacccctggctggaaaaacgcttcagatcaatttttgtgtcgccttttaattccagaaaacgggaatcaaactgaatgtcgtcttcagcccagacactgctataactcccactcattgccagcgcaatgcaccacggaagaatccgtaatcgaaaaagagaatggtcaggcatacacgtttttatccgtttttattcttgttcggtcaaaatccatttaaataccccatagcagtgtcgctatgggggtatgccttacaggtaagtaatctggaaggtggtatttgcttcgaaattacccagatctggcgcatcagctgcgccgaccagccaggctttaaagttcagagtctgcttcgctttgcctttattagtggcagtatctttcacgattttctggtcaatacccatgccgcttttgtaagaggtacccagagagtcaccgatcgccaggctaacattgttaaatgccgcaccggtatcggtattgaaaatggtgtaataattgccgctatttgcagaagaaacggtaccagtaaaggtagtggtcattgtttcctgagtatcaaatacgcaatcttgcaggcgaatctggaaatttttcggcgtggtggtgccgttatttttcagtttttcggcaccgatatcacccatatcaacttccagtttgtgatcgtccggaacgatagaacacacactgtcttcaatggtgccgtaaaaacgtgcagtaccgttgttacccgcagcgattgttgccgtagaggtgaacgcgcccatcaccattgccgcagcaatagctgttttaacaaacttactcattatttgtccttaaactataaataattaaaatataaacattgcaatacattgattcagtcaatagccaatgtttatacccagccattgaatacggcatgcgatccaaaaaaacaggtcgtaaaaaatgtattcgttggtgtggggtcgaatagtgatgttttcactcccctgattcaatttaattttactaatgagtaaatgtagatttaattaatatattgataggggaaagattatcttaaggatcttctaaaaaaacacgaaatatatatttagaaaaaacaggaagcatatcaacaatgaatgccaatagcttaaaaaacaaacaatgaacatataatgcgattggcattaacccgcttttgtcgatataatatataaacactatagccagaatttaatcaagtttcaattacgtcctgcctgattattcaactctattttctccattatctgtattaataaatgataatgagtgtcaaacagacattattcatttcaacatgtaactttgggcaaaatcaagatacgcgcagaagaatactttccgaatgaaagttaaaggtgttttatttatagatggggagagtcttcgatagtagtgaggttgacagatatccgctgcctgatgagcaattatgcccaatgaatctacctcattgggcataatttggaactcatcagatagcttttgccatcttcagattacacgggctcatctgccagttgaatgtgccgtttccgctttcatcaagcgttacgctggcaatggcgctggtggtaaacataggcggcgtttcgcccggacataactcggcaaccagatacccgactaacggtaagtgagagatcaccagtacgctagcaacaccttcattggtcaacgcctgcaaataggcactgaccagaccaacatcgccgcagggcgttaactccggcagaacttctgcactggaaggcaggttcagacaatcccctacttcttccagtgtttgctcggctcgcaggaacgggctcaccagaacgcgttcgatttccactttttgacctttcagccagttcgccatcaggcgagattcgtcacaaccattagtggtcagaggacgaacggaatcactggcggcatcgagggctgcgtcgccgtgacgcatgataaaaacttgcatattgcaccgcttttgttaaccagattcgcccgttttctttcatctgaaaccagagaaagaaaacggtggccggcattgtgccttatccattcaccgaatgaaacgctgttttttacctcaatggcgtaagtatagtcaatatgcgtttacattttgaccaacactccgccattcagcgcggattcatatagctttgaccttcttattgcaggtcagttgcagttgttttccaaaaactttccccacgcgcgcccatctcgaccaaacgctcgcaaggggtaaaacgggaaccatactgcgtggcaagtcgttgcattattgcaaccacttcgcccgcgccgagagaatcgatatagcggaacggtccaccgagaaatggcggaaaaccaatgccaaataccgcgccaatatccccgtcacgcacgctacggataacctgctcatcaacacaacgtactgcttcattcagcatcaacatcacacaccgttcagcaacctgcggtgcggagattcgcccctgcccttgtgtgccaatcagcgggtaaatggcgggatcgacctgttttttgcttttacgccctttctgaccataaagatagaaaccccggccattttttctgcctttgcgatcgtcgttcaaaatactagaaacaacatttgcaggcgcgctaaaacgttctccataagcggcttccagtacaggaataattttagtcccggtgtcgattcctacctcatccaaaagttggattgggcctaccggaaaaccaaatttcactagcgcggcatcaatgtgctctacccgttcaccttgggtcaacatgcggatagcttcattaatgtaaggcgctaagatgcgattgacgtaaaaaccggctttgtcacgcacgacaattggcgttttaccctgttttttcgccagttttactgtggtagcgatggtttgcgcgcttgtccccgcatgaggaataatctccaccagcggcattttttccaccggactgaagaaatgcaggccgataacttgctcaggtcgcgtggcgtgagcggcgatatcaccaatcggtaaagaactcgtattgctagcaaagatggtatgagcggcgcaattttgctcaacttccgccaccatctgttgtttcaattcgagattttcaaacaccgcttcaataatcagatcgcgatgggcaaagccgcgatagtccgtcgttccggagattaatgccagctgtttgtcacgttcgctggctttgagatgacgacggcgaactttgccctccagctgatcccaactgtacttcagcgcatgatttatgccctgcgggttgatatctttaattctgaccggaatccccgctttacaagcagtgacataagcaataccgccgcccatcaagccaccacctaaaatccccacgctgtttaatggcgcaggcggcgcatcactgccgggatctttcttcacgtccgtactggcaaaaaagatactacgcagcgcctggctttgtggcgtcatcgccagttcgccaaacgcccgagcttcggcgtcataaccgctgctggtgccctgcgctaatcccgtttcaacaacctccaggatgcgttctgtcgccggataattgccttgagttttgtgttctgttttcttgccgaccattttgaacagcagcgcacgacctaacggccccgccagaatacgctcgcgtacaggtagagggcgggaagatgggcgctccttctttgccagctcaacagcggcttccagcagaatggagtgcggaacaacgtcatccaccagccccagctttaatgcctgtttcgcccgaagttgttttccggtgaggatcatctctaatgctgtgctgacgcctatcagacgcggtaaacgctgggtgccgccactaccgggtaacaatccaagttgtacttcaggcaaaccgagcaccgttttaggatcgtcagtacaaacgcgaccgtggcacgccagcgccaactccagcccaccacccaggcaagcgccatgaatagccgcgataacctgaatgggcaaagcatgaatctccgccatcaactgttggccctgccgcgccagagcttccgcttcttgcgccgttttgcagttgccgatcatgttgatgtctgcgccagcaatgaagttgtccggtttagcggagacaaacaccacgcctcgcaactctttgttttcacggagttgcttaataatggcgcgcacctggctggcaaactccgccttcagggtattcattttctcacccggtacgtcgatggtgataacggcaatgttgtccagacgaacattaagggtaaacgcacttgtcatttccattattccgcctccagaaccattgccgcgccaagcccaccggcagcacaggcggtaactaaaccaaatccaccgccgcgacggcgaagttcatgcaatgtctgggtaatcatccgcgcgccggtcgccgcgaagggatgcccgtaagcaatgctaccgccaagcacgttaaatttgctatcgtccacttcgccagtggcatgtgcacgccccagtgcttcacgagcaaaacgttcactacccagcaactgaatattcgccagcgtctgagctgcaaaggcttcgtgcatatcgatcaatgtcagatcgctcatcgtcaaaccggcacgctccagcgccagcggtgtactccaggctggaccgagcaacatgtcctgccagacatcaatcgcagtaaatgcgtagctgcgcagataccccagcggcaccagccctaattctttcgcccgggattcagtcatcaggatcaccgctgccgcgccatcggtcagcggcgtactgtttgccgccgttaccgttccgtgtttgcgatcaaacgccgggcgcagctttgcgtaatcggcaaggctggaattaccgcgaatattgttgtcttcgacaagcggttgtttataaggagggataaaggcagtcatcacctcttctttgagttttccgtcactccatgcctgagcggcacgctgatggctacggtgcgctaatgcatcttgctgttctcgggtgatgccgtaggttttcgccatttgctctgcggtgtcgcccatccgcaagccggtagaatattctgctaccgcaggtggtacgggcattaagtcgcgcaaacgcaggcgagagaagagtttcagtcgctggctcatggtacgagctttgttgacatcaaccagcacgcgcgccagttttttactgacgccaattggcaatacgctagaggaatctgccccaccggcaatccccgctcgaatagttcccgccatcaggctttctgcgacgtttgcaactgcctggaaactggtagcgcaagcgcggctgacgctgtaagcatcggtatgtacattcattcccgtaccgagaacaatttcacgcgcaatgttgggggcttcaggcatttgtacgacctgaccaaagaccagttgttcaatcacttcggcggggatctcgctgcgtgccagcagttcgcctaccaccatcttccctaaatcaaccgcgggaatgccatgaaaagccgtcgcctgacgggcaaaaggcgtacgtaaaccgctaacaatggcgatacgatcgccctggcgggtaaccagcggtaaaacctgacccataacactcccctgtaaaaaaataaataaagtggtctgacctgatcatagtcttaaccatttttttacatttagccaagtggagaaaagggaaagtgggagctatgacacagagagaaaagaagaagagaaaagaaaacgcccctgccagcaactgacaggggcgtacgtacccgagaggaattaacgcagacccagctggaaaatcagcatttcagcttcgcaggcaaaagtgaaatcgatatccaggcgcacaccgtcagactcttcagtgaaagtcggggtgattttgcaaggttcagattccacgctacgggctttttcagtcagcgccgccagcgtttgctctgcttctgcgcggtttgcaaacacgcggctgtaagacgcggtgcagtcggagttgtccataatggtgccaacatccatacagcagcaaaccggggtttcatcagcactacatttactcatcgttgatttcctctgtatgtgcacccaaggtgccagataaacgttgtggatattttacgcttccggaaagtgctgctccagttgttaattctgcaaaatcggataagtgaccgaaatcacacttaaaaatgatctaaaacaaaattcacccgaatccatgagtgcgccacctccaaattttgccagctggatcgcgtttcttagatcatatttgaaaaaagatagaaacatacttgcaacattccagctggtccgacctatactctcgccactggtctgatttctaagatgtacctcagaccctacacttcgcgctcctgttacagcacgtaacatagtttgtataaaaataaatcattgaggttatggtcatgagccagaaaaccctgtttacaaagtctgctctcgcagtcgcagtggcacttatctccacccaggcctggagcgcaggctttcagttaaacgaattttcttcctctggcctgggccgggcttatagtggggaaggcgcaattgccgatgatgcaggtaacgtcagccgtaaccccgcattgattactatgtttgaccgcccgacattttctgcgggtgcggtttatattgacccggatgtaaatatcagcggaacgtctccatctggtcgtagcctgaaagccgataacatcgcgcctacggcatgggttccgaacatgcactttgttgcaccgattaacgaccaatttggttggggcgcttctattacctctaactatggtctggctacagagtttaacgatacttatgcaggcggctctgtcgggggtacaaccgaccttgaaaccatgaacctgaacttaagcggtgcgtatcgcttaaataatgcatggagctttggtcttggtttcaacgccgtctacgctcgcgcgaaaattgaacgtttcgcaggcgatctggggcagttggttgctggccaaattatgcaatctcctgctggccaaactcagcaagggcaagcattggcagctaccgccaacggtattgacagtaataccaaaatcgctcatctgaacggtaaccagtggggctttggctggaacgccggaatcctgtatgaactggataaaaataaccgctatgcactgacctaccgttctgaagtgaaaattgacttcaaaggtaactacagcagcgatcttaatcgtgcgtttaataactacggtttgccaattcctaccgcgacaggtggcgcaacgcaaagcggttatctgacgctgaacctgcctgaaatgtgggaagtgagtggttataaccgtgttgatccacagtgggcgattcactatagcctggcttacaccagctggagtcagttccagcagctgaaagcgaccagtaccagtggcgacacgctgttccagaaacatgaaggctttaaagatgcttaccgcatcgcgttgggtaccacttattactacgatgataactggaccttccgtaccggtatcgcctttgatgacagcccagttcctgcacagaatcgttctatctccattccggaccaggaccgtttctggctgagtgcaggtacgacttacgcatttaataaagatgctagtgtcgacgttggtgtttcttatatgcacggtcagagcgtgaaaattaacgaaggcccataccagttcgagtctgaaggtaaagcctggctgttcggtactaactttaactacgcgttctgataacgcgttcgcctggataaagtcacctgcatagcaggtgactttaactcccccacttcaccgaaagtagtgtcctcattgcttacctcctgagttttgcaaacagcctgttggcagcttgccctttcaaatcaataagcggtatccacagacaaacctgaagggaaaggcatattttcaggcgttctgctcgtccttctcaaagagtttacttttctgcatttccaggatactccccccccctggctattgtgcgctcatacactcaaattaaagataggttctaaataaatgagcgttttttgatagtctatttcattaggtaatatatatttgtaacaaatcaatcaaaatggaataaaatcatgctaccatctattagtatcaacaataccagcgcagcttacccagaatccatcaatgaaaataacaatgatgaagttaatggattagtacaagagttcaaaaacctttttaatggtaaggaaggaataagcacctgtattaaacatctacttgagcttataaaaaacgccatacgagtaaacgacgatccttatagatttaatattaataattccagtgttacttatattgatattgactccaatgatacagaccatattactattggtatcgacaaccaagaaccaatagaattacctgcgaactataaagacaaagaactcgtccgtactatcattaatgacaacatagttgagaagactcatgatatcaataacaaggaaatgatcttcagcgcattaaaagaaatatatgatggagatcctggttttatcttcgataagataagtcacaaactcagacatacggtaacggaatttgatgagagcgggaaaagcgaaccaacggacttatttacctggtacggtaaagataaaaaaggcgactctctcgctattgtaattaaaaataaaaacggaaatgattacttatctctcggttactacgatcaggacgactaccacattcaaagaggaattcgtattaatggtgatagtctcacccaatattgtagtgaaaacgccaggagtgctagtgcgtggtttgaaagcagtaaagctatcatggcagaaagttttgcaactggttccgatcatcaggttgtaaacgagctcaacggggaaagactgagagaaccaaacgacgtttttaaacgttatggtcgagcaataagatatgattttcaagtggacgatgcaaaatataaatgcgaccatctaaaagaaatagtttctactttagtcggtaacaaaattaacgttggccattctcaaaaaatatataagcattttaaggatctcgaaggtaaaattgaagaaaggcttcaaaatcgccaggctgaatatcaaaatgaaattaatcaaccatctgcgccaggtgttaattttgatgatatttaaaattatttttccagttttttgatttttcaacagctgaatatcggaaatagtcagtgacgaacatcagtatttttacataattacgtctaggtcattgtcggtttatctccttttacttgtggtaattgagggataacaacaaaaaaggtgagttttgcgactcaccttttttatttgtttcttattcagaatcaatatcttttaaatcatcctgaatcgcttgtgcgttcggattttcctgcggtttgagttcgccgccattagcgatgaaatcatgacgctggaagtacgcttcgcgcaccataatataaggatcggagctctgacgcagcagaccatcggaatccagcagctgagcgcgggtttcgatcccttcaagcgtccatttacccacagacatcggccaggtcagccaggaaagaaccgggtaaaaaccatccgccatatcaccaccgtcatcacgcagcgtgaagctaccgtagaacggtaactgaacgtaaggcccataacccacgccataatgaccaagcgtactaccgaagcggtgaggttcagtccgttgcagtttcgggttcgccatccctgcaacatcaataaaaccgcccatccccaaaatggtgttcaggaaaaagcgggtaaagtggaccatcccctgataagggtcgccctgcaagaagtagttaaccatcaccgcaggttcttcaaggttgccagtaaagttgctcaaaccgttacgcgccggttgcggaacataatcacgccaggcgacagcgaccggtcgaacaatatacgggtctaatacattgaagttgaagttgtacatggtgcggttgaacccttctaacgggtcagaacgcccttgctgatctgtaccggaactcgcacaccccaccagaagcgtagttcccagagcaagcgcgctcaggcgaagcttcataaatgtctccctgtttttttatggcttatgcagtttgccatccatgacggaacgataccgtatccgcctgtttaggtgtgggcgattgtaacagcacgtcaactgatgtccagacgccctgatttgctgatttgatcatagcctggtaatcgccgccctgtaggctacttgattctatagaaacagaaaaaggcaaacgcagccttttctacattttcagagtaactcccgtcagttgcgagcaaaaaagccgctacgctttagctatacgtgctaattcaagagaagagaccatggacaacgacaaaattgatcaacacagcgacgaaattgaagttgagagcgaagaaaaagagcgcggcaaaaaaatagaaatagatgaagaccgactcccctcccgggcgatggcaattcatgagcatatccgccaggatggtgaaaaagagctggaacgcgacgcaatggcgctactgtggagtgccattgcggcgggtctgagcatgggcgctagcttactggcaaaagggatatttcaagtcgaactggaaggtgtgccgggcagcttcttgctggagaatctcggttatacctttggttttattatcgtcattatggcccgccagcaattatttaccgaaaataccgtgactgcggtactacccgtcatgcaaaaaccgacaatgagcaacgtcggcttacttatacggttatggggcgtcgtgctgctgggtaatattctcgggacaggtattgcggcgtgggcatttgaatatatgcctatcttcaatgaagaaactcgcgatgcatttgtcaaaatcggcatggatgtgatgaagaacacccccagcgagatgtttgccaacgcgatcatttccggctggctgatcgccactatggtttggatgtttcctgcagcgggtgcggcaaagattgtggtgattatattgatgacctggcttattgccctgggtgacaccacccatatcgtggtcggttctgttgaaatcctctatctggtgtttaacggtacgctgcactggagcgatttcatctggcccttcgcactacctactttagcggggaacatctgcggcggcacctttatcttcgcgttaatgagtcatgcacagattcgtaacgacatgagcaataagcgtaaagcagaagcacgccaaaaagcagaacgtgcggaaaacattaagaaaaattataaaaacccggcataaatggcgagggtttaagcaatcgagcggcagcgtacttaccccgcactccattagcgggtatactcatgccgcattgtcctcttagttaaatggatataacgagcccctcctaagggctaattgcaggttcgattcctgcaggggacaccatttatcagttcgctcccatccgtaccagtccgcaaaatcccctgaatatcaagcattccgtagatttacagttcgtcatggttcgcttcagatcgttgacagccgcactccatgacgggtaaaaagtggataaaataattttacccaccggatttttaccctagagccatacagcctcacactcgatgaggcctgtcagtttcttaaaatatcctgatctaccatcgccgtcatagagcgtatttttattacctgatttgcaggttcgattccctattcggagatagcactcatgcaacacgaactacagcctgatagtctggttgatttgaaattcatcatggctgatactggctttggtaaaaccttcatctatgaccggattaagagtggcgacctgccaaaagccaaagttatccacgggcgagcaagatggttatatcgtgaccattgtgaattcaaaaataagctcttaagccgcgccaatgggtaaaatagcgggtaaaatatttctcacatctaaaaaacaccattccaatcaatcccctgctgcttcaagtagatgtctgcaggggacaccatccttgtgtttatccctaaaaccacataaaaaccgtaaattaaattcgaactagcaggccgaataaggcacaccaggaactcgtggttttattcattaactagtggtttttacctgttctcttagccagataataaacgcttcaatttttggccactgcctgcccggtaatgtggtgatgtaataatgctgatggcatttcaccgtcatatcgccaaacggcgcgacgagctcaccactggcaagccttttttgtaccaggcgttttcttcccatcgccaccccaatatgattcatcgcggcaataacagctaaatcagaacgatcaaagccaattccagaagatgtcggcaaattaaccgcataatgttgcgcccaactatgccattcatccgtaccggagtcgttgctccatgcctgtctgtcatggagcaacgtacagtgacacaggttaattaccgtgttggttaaagcatgtctttgagcgtattccgggctacatactggcaggatttcttcatccatcagaaagtgatgagtgagttgcgcactcggcgcatcatcaaagtagatcgccaaatcgattccggcacgttgcagattgacgttgtcattaccagtgagcacggtgaggctaatagacggataccggcgtgtaaagtcacctaatgcgggcaccaaccagcattgggcgatagagggccgggaatacagagttaacgttccgcttaactcctgatttttgatatcaagaatttcctggttcagggtatccaggctgctttttagcgcccaataaacacgtttcccctcgtgcgttaattccactttgcgatgggaacgaacaaacaactgaatgcccaattcttcttccagctgattgatacggtgacttaccgcactggggctcaggctcaattcctctgccgccagggcgaaggactgatgcctggcagccacttcaaaagtatgcattttacttaattgccagccgttaagcagccgatttcttatttcacgaaggggttccataatcacctcatttttcgcttaagtgtaaaaaaatagcggcaaaatttcagctatgagatgagctaaagtgaaccatatctcaattcaccttcatttttagatgtaaatcactccattgatgcaatttacctcatgtgaaaggcaaattttatcgtttgtcagcctgcgttgtttttttgtccaatatcatcaggttaatcacaggggaaggtgagatatgcactctcaaatctgggttgtgagcacgctgcttatcagcatcgtgttaattgtactgaccatcgtgaagttcaaattccacccgtttctggcgctgttgctggccagcttcttcgtgggaacgatgatgggcatggggccactggatatggtaaatgctattgaaagtggaattggcggaacgctggggttcctcgcagcggttatcggccttggcacgatactgggaaaaatgatggaagtatccggggccgcagaaagaattggtctgacacttcaacgctgccgctggcttagtgttgatgtcattatggtgctggttggcctgatttgtggcatcacgctgtttgttgaagtgggcgtcgtgctattgattcctctggcttttagtattgccaaaaaaaccaataccagtttattaaagcttgccattccgctatgtaccgcattgatggcagtgcactgcgtggttcctccacatccggctgctttatatgttgccaataagctgggcgcagatatcggtagcgtgatcgtctacggtttgctggttgggctgatggcaagtctgatcggtggcccacttttccttaaatttctgggtcaacgactgccctttaaacctgtacccacagagtttgcagatctcaaagttcgcgatgaaaaaacactaccgagtttaggcgcaacgttattcaccatactgctacccattgcgctgatgttggttaaaacgattgccgaattgaatatggcgcgtgagagtggtttgtatatcttggttgagtttattggcaaccctatcactgccatgtttatcgccgtgtttgtcgcctattatgtgttgggtatacgccagcatatgagcatggggacgatgctcacacatacggaaaatggcttcggttctattgctaatattttgctgattatcggggccggaggcgcattcaacgccattttaaaaagcagcagtctcgctgatacgctggcagttattctctccaatatgcatatgcacccgattcttctggcctggttagtggctcttattctgcatgcggcagtgggctccgctaccgtggcaatgatgggggcaacggcaattgttgcacccatgctgccgctgtatcccgacatcagcccggaaattattgcgattgctatcggtagtggtgcaattggctgcactatcgttacggacagccttttctggctagtgaagcaatattgcggcgctacgctcaatgaaacatttaaatactatacgacagcgacatttatcgctagtgtcgtcgctctggcgggcacattcctgctgagttttatcatctaagcgcaaagagacgtactatggaaaacgctaaaatgaacagcctcatcgcccagtatccgttggtaaaggatctggttgctcttaaagaaaccacctggtttaatcctggcacgaccagtttggctgaaggtttaccttatgttggcctgaccgaacaggatgttcaggacgcccatgcgcgcttatcccgttttgcaccctatctggcaaaagcatttcctgaaactgctgccactggggggattattgaaagtgaactggttgccattccagctatgcaaaaacggctggaaaaagaatatcagcaaccgatcagcgggcaactgttactgaaaaaagatagccatttgcccatttccggctccataaaagcacgcggcgggatttatgaagtcctggcacacgcagaaaaactggctctggaagcggggttgctgacgcttgatgatgactacagcaaactgctttctccggagtttaaacagttctttagccaatacagcattgctgtgggcagtaccggaaatctggggttaagtatcggcattatgagcgcccgcattggctttaaggtgacagttcatatgtctgctgatgcccgggcatggaaaaaagcgaaactgcgcagccatggcgttacggtcgtggaatatgagcaagattatggtgttgccgtcgaggaaggacgtaaagcagcgcagtctgacccgaactgtttctttattgatgacgaaaattcccgcacgttgttccttgggtattccgtcgctggccagcgtcttaaagcgcaatttgcccagcaaggccgtatcgtcgatgctgataaccctctgtttgtctatctgccgtgtggtgttggcggtggtcctggtggcgtcgcattcgggcttaaactggcgtttggcgatcatgttcactgcttttttgccgaaccaacgcactccccttgtatgttgttaggcgtccatacaggattacacgatcagatttctgttcaggatattggtatcgacaaccttaccgcagcggatggccttgcagttggtcgcgcaagtggctttgtcgggcgggcaatggagcgtctgctggatggcttctatacccttagcgatcaaaccatgtatgacatgcttggctggctggcgcaggaagaaggtattcgtcttgaacctagcgcactggcgggtatggccggacctcagcgcgtgtgtgcaagtgtaagttaccaacagatgcacggtttcagcgcagaacaactgcgtaataccactcatctggtgtgggcgacgggaggtggaatggtgccggaagaagagatgaatcaatatctggcaaaaggccgttaataacgtttcaacgcagcatcgcaatcctttccctgggtgagcgatgctgccgatggcgcagacttaagatccccggtcttacccgctataaccccctccttttatcatcacccaacgcctttcgctgtaaacggcggtttcgcaaaccaaaccaaaaccgtaagtaagataaaagcaatagccgccatacggaaaatctcatttgcagaaatagaaagactctgctgggttatttcattattaatttcattaagaactccactaaggctaccataatatttatccataatttgactgctactattaaacacggggttaaattgatcgatggttgctgtcaactgactatggtgtaagctttcgcgtcgtccccacagcgtcattgtcaagctcgtaccaacacttccactcaaggtacgaaaaaaattactcatactgctggcattggcaaatttattatctggcaagccactaaagctaatcgttgttaagggtaaaaagaaacaggcaacggcgaatccctgaaaaaactgcggcaaaatgatgcctgtaaaatcaatcgttggcataaatgtcacagaacgccagtaatagcaaaccgcatacatcaaaaaactaaatgtcactaacaaccgcatgtctattttgttgccataacgtcctatcaaaggactaattaatagtggcatgatgccgatgggcgcataagcaagtccggcccatatcgcattataccccatcgtttcctggagtaactgcggcataaggacgatcgctccagagtaaaataaatacgcgcatgtgatactcacaataccaatggtgaagttacgggacttaaacaaactgagatcaagaatcgggttctcactggtgctctcccaaatgactaaagagatcagagaaataacacttactactgttaatattattattgtactgctgttgaaccaatccagatcgcgccctttatcaagcataatttgcaagccaccaacaccgagcactaacagggtcagtcctggtagattcattttgaccggactagtctcagtttctcttcctttaagtaaggttaagcataatgtcaggacgataatccccatagggacattgattaaaaatatccaaccccagctaaagttatcacaaatataaccgcccaatatcggcccacatatcggagcgataatcacggtcatactccataatgccagagcaaatgttcttttttctggcggataattccttaataataaactctgactcagtggaattaacggccccgccattaacccctgaacgactctaaaaaatatcagcacatcaagattggtgcttaggctacacattaaactagacaggctaaaaaaagtgacactaagtaaaaataatcttaattcgcctattctttgtgccaacctgccagtaacagggatcgcaatggcatttgctacaccaaagctggtgataacccaggtgccttcgtctgtacttgctcccagaaagccagatattgtcggtattgcgacgttagaaatagtggaatccaacatttgcataaatgtcgctaaactcaatgcaatagtgacgcaccataacgtcccaccggttaatggtgccggagtacttttagtgattgccattaaagttgtccattatggctaataatgttgctaatttctttttctatcggactggtatcgataactaaagccttactggtataagccggcatggaggtcacggtactagccagctcaggcatctcggcaatgtcttcgttcttcgtatcaatagttgctgtcatgcttaaaccaatacgcaaggggtgttccatgagttcttttggatcaagagaaacttcaaccggtacacgctgaacgattttgatccagttccctgtcgcattttgtgcaggtaataaggagaacgcattgccggttcccatattgatccctgtcacccgaccatgaaacacaacattttcaccataaagatcgctgataatattgacgctttgaccaatccgtacatccgtgagttgtgtttctttaaagttggcattaacccacatttgacgtgccggtacgacagccattaagctttgtccggggctcactgtttcgccgacctgaacacttctctgggcaatatagccggtaaccggactcttaatatccgtacgtttaagcgccaaccaggcttctttagttgcatccgccgcttcaacgacttgtggctgacggtttaatggtgtgttcattactaaagctttattcgctttataagcctggatagcggcattcaatgccgctttgctacttattaacgtatctttggtatgctccagcgtttctttactaataaccccctgcttcgctaacggcactcgacggttataatcttctaaagattgttgatactgaatacgtgcactagcgacttcggcactgtattgtttatcctgtaagtatagtttattcgtttgccgaacaatatttgccagattatttttagctttattgagtgcgatagtggcatcagttttatccagactaactaaaatgtcaccttgtcgaacgtagttcgtatctttatgattaacgacagtgacactaccactgacttgtgcagaaattggatctgcattccccgtgacataggcgtcatctgtactaatcatgtcttctaattccatactccaataggcataggcaccactaaacgcaataaataaaactaccgccaataaagaaaagtattttcttctgttagaatgttttttattactattaatctgttccactattatctctcatttctcatagatgaaatttatgaattgaatgaaaagagcattcattcttcatatcaaacacagtgcatgtgttgcacattatcccaggaacgttggaggcctaatttaaatgaggtgcaaaaaaaacaacagaggactaaaccgtggcttttgcaatacaattcttacgcctgtaggattagtaagaagacttatagtgccaacttgaaactataaatcatcggtacaatccctgattttattgttgacatttcatttatgccgactatttatatggtatacttgtcgaattatcttaaaggaagctcagattttcttatttttattgagaaaatgagatgacgccttatgtctgtattactacagggagaagggagatgcttcattgcaaagggaataatctatgaacgcaataattattgatgaccatcctcttgctatcgcagcaattcgtaatttattgatcaaaaacgatattgaaatcttagcagagttgactgaaggcggaagtgccgttcagcgggtggaaacacttaagcctgatatcgtcatcattgatgtcgatatccccggagttaacggtatccaggtgttagaaacgctgaggaagcgccaatatagcggaattattattatcgtctccgctaaaaatgaccatttttacgggaaacattgtgctgatgctggcgctaatggtttcgtgagtaaaaaagaaggcatgaacaatatcattgcggctattgaagctgcaaaaaatggctactgctatttccccttctctctcaaccggtttgttggaagtttaacgtccgaccagcaaaaactcgactccttaagcaaacaagaaattagtgtcatgcggtatattcttgatggcaaggataataatgacattgctgaaaaaatgttcatcagcaacaaaactgtcagcacttataaaagtcgcctgatggaaaaattagaatgtaaaagtctgatggatctttacacattcgcacaacgtaacaaaatcggctaaccacatgaagtttttaccctatatttttcttctctgttgtggtctttggagcaccataagtttcgcagacgaagattacatcgaatatcgtggcatcagtagtaacaaccgtgtcacacttgatccactacgtctgagcaacaaggaattacgttggttagcgagcaaaaaaaatcttgtgattgcagtacataagtcccaaacggctacgttgttgcataccgatagccagcaacgggttcgtggtattaatgctgattatttaaatcttttaaaaagagcgttaaatatcaaattaacactccgggaatacgcagatcatcaaaaagcaatggacgcgcttgcagaaggtgaagtcgatatagtgttaagtcatttagttactagcccgcctcttaataatgacattgctgcaaccaaaccattgataattacctttccggcgctggtaaccacccttcacgacagtatgcgaccgcttaccagtccaaaaccagtaaatattgctcgggtagcaaattaccccccagacgaggtaattcatcaaagttttccaaaagcaacaattatctcttttacaaatttatatcaggcattagcatccgtcagtgctgggcacaatgattactttattggtagtaacatcattaccagcagtatgatttcccgctatttcactcactccttaaatgtagtgaaatattataacagcccgcgtcaatataattttttcttgaccagaaaagaatctgtcattcttaatgaagtactcaatagatttgttgatgctttaacaaatgaagttcgctatgaagtaagtcaaaattggcttgatacaggaaacctggcctttctgaacaaaccattagaactcactgaacatgaaaaacagtggattaagcagcatcccaatttaaaggtgctggaaaatccttacagccccccctattctatgacggatgaaaatggcagcgttcggggcgttatgggggacattcttaatattattaccttgcaaacaggtttaaatttttctccgatcaccgttagtcacaatatccatgctggaacacagcttagccccggaggatgggatataatacctggcgctatttatagtgaagatcgagaaaataatgttttatttgctgaagccttcataacaacgccttacgtttttgtcatgcaaaaagcgcctgacagtgaacaaacattaaaaaaaggaatgaaagttgccattccatattattatgagctgcatagccaattaaaagagatgtatccggaggttgaatggatacaggtcgataatgccagcgctgcatttcacaaggttaaggaaggtgaacttgatgctctggtcgcgacacagctaaatagccgttacatgatcgatcattactatcctaatgaactttatcattttcttattcctggcgttccgaatgcaagccttagcttcgcttttcctcgcggagaaccggaacttaaggatattattaataaagcactgaatgcaattcccccaagcgaagttctgcgcctgacggaaaaatggattaaaatgcccaatgtgaccattgacacatgggacctatatagcgagcaattttatattgttacgacattatccgttttattagttggcagtagccttttatggggattctacctgttacgcagtgttcgtcgtcgtaaagtcattcagggtgatttagaaaaccaaataagtttccgaaaagcactcagcgattccttaccgaatccaacttatgttgtaaactggcaaggtaatgtcattagtcataatagtgcttttgaacattatttcactgcggattactacaaaaatgcaatgttaccattagaaaacagtgacagtccctttaaagatgttttttctaatgcgcatgaagtcacagcagaaacgaaagaaaatcgaacaatatacacacaggtatttgaaattgataatggcatcgagaaaagatgcattaatcactggcatacattatgcaatcttcctgcaagtgacaatgcagtatatatttgtggttggcaagatattactgaaacgcgtgatctaattaatgcactcgaggtagaaaaaaataaagcgataaaggctaccgtagcaaaaagtcagtttctggcaacgatgagtcacgaaataagaacaccaataagctctattatgggcttcctggaacttctgagcggttctggtcttagcaaggagcaacgggtggaggcgattagtcttgcctacgccaccggacaaagtctcctcggcttaattggtgaaatccttgatgtcgacaaaattgaaagcggtaactatcaacttcaaccacaatgggtcgatatccctactttagtccagaacacttgtcactctttcggtgcgattgctgcaagcaaaagcatcgcattaagttgcagcagtacgtttcctgaacattacctggttaagatcgaccctcaggcgtttaagcaggtcttaagtaatttactgagtaatgctctcaaatttaccaccgagggggcagtaaaaattacgacctccctgggtcacattgatgacaaccacgctgttatcaaaatgacgattatggattctggaagtggattaagccaggaagaacaacaacaactgtttaaacgctacagccaaacaagtgcaggtcgtcagcaaacaggttctggtttaggcttaatgatctgcaaagaattaattaaaaatatgcagggcgatttgagtttagaaagtcatccaggcataggaacaacatttacgatcacaatcccggtagaaattagccagcaagtggcgactgtcgaggcaaaagcagaacaacccatcacactacctgaaaagttgagcatattaatcgcggatgatcatccgaccaacaggctattactcaaacgccagctaaatctattaggatatgatgttgatgaagccactgatggtgtgcaagcgctacacaaagtcagtatgcaacattatgatctgcttattactgacgttaatatgccgaatatggatggttttgagttgactcgcaaactccgtgagcaaaattcttccttacccatctgggggcttacagccaacgcacaggctaacgaacgtgaaaaagggttaagttgcggcatgaacttatgtttgttcaaaccgttgaccctggatgtactgaaaacacatttaagtcagttacaccaagttgcgcatattgcacctcagtatcgccaccttgatatcgaagccctgaaaaataatacggcgaacgatctacaactgatgcaggagattctcatgactttccagcatgaaacgcataaagatctacccgctgcgtttcaagcactagaagctggcgataacagaactttccatcagtgtattcatcgcatccacggtgcggctaacatcctgaatttgcaaaagttgattaatattagccatcagttagaaataacacctgttagtgatgacagtaagcctgaaattcttcagttgctgaactctgtaaaagaacacattgcagagctggaccaggagattgctgttttctgtcagaaaaatgactaaatagcggctcccacaatgttcaaatgtgggagctatttaccagcacatcttacatttaactactgaactcctggcgaatttgttccccatgctggtcgagcgttgccgctcccggcataacatgcgggtccgcgcagccgctgatttttatcggattacccggcatcattattcccccggcttcaatcaacatatttctcgcctgagtttgtggcaatttaatggcctcagccacacttaataacggcgcgacgggtacaccaacttcatgtattctggctaaccaaacttcagctgcctgcgtttttaacgtccgctcaatatattgtttaagaatagcctggttttgtacgcgtaaaatattgctgctaaatcggggatcattaaccagttccgtaagctccagtgcctggcataacgcagaaaaaagcttgtcattaccacaacaaatcgtaatcggcttatcctgagtattgaaaacatcaaaaggtgccatgtagggatggcgatttcccagacgttgtggactcttcccagttgcgatatatgccatcagaccatgctccagaaaactcagcgtggcatcaaacatcgctatatcgacatgcgcccctctctggctcttttcgcggccataaagtgcactcactattccgctgaataaatagacaccgccgcatagatccgcaagagatgtaccaacgcgcactggcggagcatcaggatatcctgtttccatcattatcccgctcattgcctgaatgatggtatcgtaggcaggagcatcttttagcggaccggtatgtccgaaaccactgctactagcatatatgaggcgcgggttgatttcttgaagcgtttcccaactaaaccccagtttttccattgtacctgggcgaaaattctcagctaatacatcagcttgtttgagcatatttataaatatacttttatcgtgatcattctttaaatcaagaaccacactctctttgccatgattaataaaactgtaatagagactctgtccatccacatagggaccaaatgtgcgggtatcatcaccatgacccggcggctcaactttaattacccttgcgcccatattacaaagaagttgagttccgaaaggtccattaaggacatgtgtcatatcgataactaataagccttcaaacggccctttgctttcattatttgtcatttgcttatgccttgaaaaaagccgaaggtgaaaagacacttcggcatttatgtaaaatcaataacatgattaattaactaaccagtcgactgacataaatccacaagggagccgtgacgacaaagcccagtacgctcacagccaaactcgctgtaccagtacgggtgtagacattaaaccggctggcaataatgattccggagaatgccggcggtaatgcgcctgccagtaccatcatctgcagatgttcgctgttcaaatgacatgccataccaacgagaagcagtgccagtggcatcagaatcagcttcaggaaggtgttataagcaatttcggcactgaactcgaatttatgtgcagccagagtcaaccccgcagcgaataccgctaccccactgttagccttcgcaatcagattaaaggttgggtcccatgctgccggaatttttaccccaaccaacaccaggatcgttgccagaacaggtgcccatactactggctcctttgccgcagaaattaatgcgctcagattactattcttcttaccatccgctccactagaaggattcagcaaatacagaccaataggaatagtaattgcgttaacaataatagaaataattgctaccactaaacctgtacttacggaatcaccataaataggatcgagaactgcaaaccccaggaatccaatggtaggactacctgcaattaatgcacatacagctgcttctgcatgggtacgtttaaaaaatttgtagcaaccgaaccaggagaaaaagaaacatccgacaataaccacaagacttacaagggtcagacgagtgtccgcaaaaatcatttccctgtttgcccgagtaatagatacaaatagagccgcaggaagcgcgtagtttaataccagtttattaaatgcccgagcttgatcttcactaaatgtttctcgtctgccgctaaaataacccaacagcatgattacgataataggcaataaatcgccaataaaaaatgttagcataatagtatttccgataagggtcccctcaccatcgcataatgagttggcaagaggagacgatgtcagtatttaattaccagcgacttgttttgggttaagtttggtaatatggccactttcagttcctgctgcagggtcgatgaccacattaataatggtcggtttgcggctctgaataccggtggttaaagcatgacgaagttcatctgtcgtggtgacgttatagccaacgccacgaaacgcatccattaatttgtcataccttgcatggtgcaacagatccgttggacttggtgcaccagcgccactgagatcaacaccgtctcctctgtagatgccgccattattaaaaataacgatcgtcaccggcaggttatatcgacaaatcgtttcaatttccatcccactgaaaccaaaagcactatcaccttcaatggcgacaaccggagaaccagaagtcacgctagcaccgatggcatagcccataccgatgcccatgacaccccaggtaccacaatccagacgacgacgtggtttatacatatcaataatatttcgtgcattatccagggtatttgcaccttcattaactaaataaatatcctggttctcgcgcaatacgtcgcgcacagcacttaatgcattaaagtaatttaatggttgagtatctgtacttaatttttcatgcattttttgtgcattttgctgcttgtggatatttaaaatatcgcgccataccagtggagtcgtaaatgtgttttgtttcagttctgccagcataccttgcatactggatgcaatatcaccaacgactggcacagcaatggggcggttgctgtcaatttcctgcggttcaatatccagttgaataaactgtgtatctgccgcccatccttttttaccgtgtgccaataaccaattcagtcgtgcaccaacaagcatgacaacgtcagcatttgccagggcaaagctacgcgcagctgccgcagaaagtggatgcgtatcttcaaggatccctttcgccatagacattggcaggaatggaatctgagcactttcaataaattcacgaagctgttcatcagcttgactatacgccgcgcctttgccaaggataattaatggccgttcagcttttgctaaaaggctaattgcgctagtgacactcttcgggcatggcaataatgctgggctcggattttcaactttaacaatcgtggttaacgcttcgtctttttccatcgtcgcggccaggacatttgctggcaaatcaagataaactccgccagggcgaccgcttacagagacccggatagcgcgtgccaatgcaatgccaagatcctgcggctgattaacgcgaaatgctgctttggcatacggttttgccgcattcatttggtccagctcttcataatcaccttgctgtaggtcgacgatcgcgcggtcgctggagccgctaatcatgatcatcggaaaaccatttaccgttgcgttggccaatgcggtcaaaccattgaggaatcctggcgcagaaactgtcaggcagatccccggtttttgggtaagaaaaccgcttgccgcagcggcatagcctgcgctctgctcatgacgaaaaccaatataacgaatgccttccgcctgggcatggcgtgccatatccgtcacaggaatacctacaacaccataaatagtgtcaatattattctgttttaatgcttcaacgatgatatgcataccatctgtcatttgaagttgatcactcatgattaataacctcgaaatttttataaattgggagccagaagcccccgttaatatcagatggcgtggttttgcttcattgcagcaatttcatcgtcgctataacccagctcctgcaatacagcagcggtatgttcacctaatagcggcgcagctttaatatccggcgtaaaggcagagaatttcattggacaaccaacggtcagatattttccacgcaacggttgttccacttcaacaacactgccactttggcgcaaagagggatcaagactaatttctttcatacttaaaaccggtgcacaaggaatatcaaactgagtcaaataggccaccgcttcatgtttatcaatagtgacagtgtatttttcgatttcagcaaaaatatcgaaaatatgtggctgtcgtgcatgggctgtactgtatgccggatcggtaatccattctggtttgccgatggctttacaggtgttttcccagttttgctcctgaatagtgaaataaatataggcgttaggatcggtttcccagcctttacatttcaggatccagccaggctgaccgccaccacctgcattaccaccgcggggaactgcatcaccaaatgtaccattcggatactgcgggtattcttccagataacccaatttatcgagacgctgctggtcacgtaatttcacgcggcaaaggttcaatacggcatcctgcatactcatggtgactcgttgcccacgccccgttttttcgcgatgcagcaaagcagcaagtaaaccgatcagcaaatgcattccggtgttgctgtcacccaacgctgcagcgcttaccagcggcggaccatcccaaaaacccgtagtggatgccgcgccacccgctgcctgagcaacgttttcataggcttttacattcacataagggctacactcatcaaaccctttgatgctaccaaaaatcagacgtggattgatttcttgaatatgctcccaggtgaagcccatgtgatcaatggcccctggatgaaagttctcgactaagatatcagcttcgcggatcagcttttccattacctctttgccttccgctgttttggtatttaactcaatagaacgtttgttactgttaagcatggtgaagtaaagcgcatcgatatcaggaatatctcgcagctggtgacgcgttacgtcaccaacgccgggacgttcaattttaataacgtcagcgccaaaccaggccagcatttgagtacaagatgggccagattgcacaccggtgaaatcgagaactttaattccttgaagtggagtactcatagcaatacctattagttaattaaatatgtgttaatttagcgtttatttaaggcgtaatatcttctataaataacccgcaaaatatcgtcgtagctgcactcgatatttttaaaatcctgtatcaagtgctgaaaatcatttcatcgccacttccaattcctttctgcatggtaagtagtgaggacgaaaagaagaatatgataaatattgattcgtggtaatcagagagagtcgcgacatttgtgatgttattcttacaactgtaagaagcgccggtgatttacaagcaagggtatgattacgctttttaaagcgtaccataaaacataacataataaatgatttgtgatgacacgggattattgcggtttactttgaggaatataaaatgcgagtttatagcaccgcgagcgccaaataattttatgaccacaacctgtcgtattgtggtcataaaaaattgtcggctggagggagttaaatcctttacctcaatatactgcctgtcagcattagttcacaaacagtgcttcgctatcgacgatgattccatcttccgcacctttaagcgccaggtttgcctcgtagtattgctttttatcaagcagtttctgcgcatcagcaagtgcattacgagtctgtttaagtggcatcagatattggttttccattacgccaacaccggccaggcgaagctcttccattgcgccctttttatcccctttcgccattttttcattggcaatttttatcgcggcttctttttcgggagttgctacataactctcagaaattccgacagatgcattaatgacaatatattggtcatcattgagattggtctttttacctggcttagcgaactttgcccattcggtactgtcatcactcagcaaagcggaagcttcattggtcagttcttttgccttttctggatcgccatgaaacagagccaggcgcgctacctgcacgtcacgcatcgcatataaaccttgttcagagatacgctctgctgccgctgccgttttctgggtttgctgaacttgctgagtttgctgttgtgccgctaccggagcattatcagcagcccatacagtactagatgccagaattgctgtgaccatcgtggccataattaaacgtttcatacttacctcattctttaacagttttagaaaacgccgccatcatattgggtgagcatgaaatgagaaatcagagagcaacggtcattttgaaagggttatcttacagttgtagttattatcgcaagaagtattttagtcttacaattgtaggaatatgcttcctgtcgcagagaactattcttatataccacaaagagatgtcatttattatatcgatgtaaatactgattaattaaatgtaaatacagccataacatcgtaggttctcagtgaaccattttcaggataactttctatgaaagtaaacttaatacttttcagcttatttttattggtctctattatggcatgcaatgtttttgcattttccattagcggtggtggaagtgagaggagctataaagagactgaaaaaacaagtgcgatgacgaccacacactctacaaaacttcagccaagtcaggcgattttgtttaagatgagagaagatgcgccaccattaaacctcacagaagaaatgccgcccccttttccgacaaaggcgaattatcttattcatcctgtgcgataacgtctttcacatggcaggtgaacaatcatgtctgatgctgatgtgaacacctgcccaaatgagccatcctgacccattaccgcctgccataccccaccataaagcgaatcatcaagccacaagccggggcaagaaacataaatatccccgtcactagttcattaccgccagttaaccacatggtgaagtaataaatgagtgcagcgaggatcaccatgccgaagaaagaagagaccgcgcttaccacgttcagtacctgaccgatgtagccgcttacgcagacaatacacagggcgagaaacatccataaattaatcatagctcaacctcctgccgcgctaaaaaacctgtaacttcagtcactttaatagtaagacaatccttaacctctggcaatttttgctaagcatcaatgaaaacagcatgttaaatgcaagactgttgtgtacggaaaaatatttactttgcacgattaataatcagtagctgaaagcagtcagcgagtgataaagtacagataccgcattcatgctcctcgtggttatgtcctgactagtctttacactctttacaggaaccattgtcgtacatgatggcccaaccaattgagtgtaccgctgtcgacatggaatcttctgcgatacaacaattcgtatctacagaaggtaactatgtttccacaatgcaaattttcccgcgagtttctacatcctcgctactggctcacatggtttgggcttggtgtactctggctttgggtacagcttccttatcctgttctctgctttctcggcacgcgtattggcgcaatggcgcgaccattcctgaaacgtcgtgaatctatcgcccgtaaaaacctggaactttgtttcccgcagcattctgcggaagaacgcgagaagatgattgccgaaaactttcgtagtctcggcatggcgctggtagaaaccggcatggcatggttctggcccgacagtcgcgtacgtaaatggtttgatgttgaagggttggataaccttaaacgcgcacaaatgcaaaatcgcggcgtaatggttgtcggcgtccattttatgagcctggaactgggcggccgcgtgatgggactgtgccaaccaatgatggctacctatcgtccacataataatcagctgatggaatgggtgcagacccgtgggcgcatgcgctctaacaaagcgatgatcggcagaaataatctgcgcggcattgtcggtgcactgaagaaaggtgaagcggtatggtttgctcccgatcaggattatggtcgtaaaggcagctccttcgcgccgttctttgcggtggaaaatgtcgccacaaccaatggcacctatgttctctcccgtctctctggcgcagccatgttgaccgtaacgatggtaagaaaagcggattacagcggatatcgtttgttcatcaccccagagatggaaggctacccgacagatgaaaatcaagccgctgcctatatgaacaagattatcgagaaagagatcatgcgcgcaccggagcagtacctctggatccaccgtcgctttaaaacgcgcccggtgggagaaagcagcttgtacatttaacaaactgctcttactctttccctcctcaaatcggccataataacctcatggtttttatggcttttttcttaaggttttttccttcgctgaatatctaattattaccgtcagaaattaaactgtcgccgatatgagacacttgtaagttactaaaagtaaataagaaaatgcctcttgtctcgtttcagttttaggcgtacattagcgccgtctcgagcagtttagctcagaattctggggtgatgcccacggtaaaatacagggcttttaaggtcgctttgcccggtgtcaactcactgtatcaggtgtaatgaagtcattcaggcgtaacagtaattacgcggagagatgtaaagtgaaatatttctttatgggcatttcttttatggtcatcgtttgggccggtacttttgccctgatgatctaaaagcaaactgtgcaatgaaaaacaggagccatcaggctcctgtttgcatttctgacgacggtgtttattccgcgttttcgtgaatatgtttgctgctggcgggtagtaaaccgtcggcacggaacatcgctttaatccctctgatggcctgacgaatacggtcgcggttttcaatcagtgcaaagcgaacatgcgtatcaccatagtcgccaaagccaatccccgggctgacacaaaccttcgcttcgttaaggagcttcttggcaaattccaggcttcccatggccgcatatggttccgggattttcgcccagacatacatgctagccttcggcatttcaaccatccagcccgcttcatgcagccctttaaccaatacatcacggcggcgtttgtactgttcggcaatgtcgcgcacgcactgttgatcgccctccagcgccgcaatcgccgccacctgcaacggcgtaaaggtgccgtaatcgtgatagcttttaatacgagccagggcgctgaccagcgttttgttgccaaccataaagccgatacgccagcccgccatgttgtagcttttgctcagcgtaaagaactcgactgccacatcgcgtgcacccggtacctgcataatactcggcgctttccagccatcgtagacgatatcggcataggccaggtcatggaccaccagcacatcgtagcgtttcgccagcgccactactttttcgaagaactccagttccacgcattgcgcggttgggttactcgggaagccgaggatcatcatcttcggtttcggataactttcacgaatggctcgctccagttcgttgaagaaatcgacaccttccaccagcggcacactgcgtacctgcgccccggcaatcaccgcgccataaatatggatcgggtaacttggattcggcaccagcaccgtgtcaccatgatccagcgtcgccagcatcagatgcgccaggccctctttgctaccaatagtgacgatggcttcactttccgggtcgatttcaacgtcgtagcgatcctgataccagcgggaaatggcgcgacgtaaccgcggaatgccgcgactagtggagtaaccatgcgtgtccgggcgctgggccacagtacataatttttcgacgatatgcggcggagtcgcaccgtccgggttacccatgctgaaatcgataatatcttcgccgcgccgacgcgcagccattttcagttcagcggtgatgttaaaaacgtagggcgggagacgatcaatgcgcgtaaagcgacgttcagggcgagtgtcagccataatttcctcagattaacgttagcgcccggaccgtccgagcgacgctgccacgatggtggctgttttgaaaatagcctgattaatttctgtctgtccagtgttttagaacattttattaatgacgttaaatgaggaactctgctttaaaaacaggaaatttatctgcgctaacaagaaaattaccactcattttattaacataataatttcaataaatttactaaccagaagtgcattatcaagagatgcattgctaatacaccatttatctatcaatccccttttaaaattgtggtttttcctcaaaaacggcctgctggtcatcagccttcaggttacctatcatagaggtttaatccttattcagagtcacccgtgcacgaaatattcaacatgctgctggcggtcttcgatcgggcagcgttaatgcttatctgcctgttctttctcatccgtatccgcctgtttcgcgaactgttgcacaagagcgcgcactccccaaaagaattgctcgccgttaccgccattttcagcctgttcgccctgttcagcacctggtccggcgttcccgtagaaggcagcctggtgaacgtacgtattatcgcggtgatgtccggcgggattctgtttggcccgtgggtaggcatcattaccggcgtgattgcgggtattcaccggtatttaattgatatcggcggcgtgacggcgatcccctgctttatcaccagcattctggcgggttgtataagcggctggatcaacctgaaaatccccaaagcacagcgctggcgcgtcggtattctcggcggcatgttgtgtgagacgttgaccatgattctggtaattgtctgggcaccaactaccgcgttggggatcgatatcgtctctaaaatcggcattccaatgatcctcggtagcgtctgtatcggctttattgtgcttctggtgcaaagcgttgagggcgaaaaagaggccagcgccgcgcggcaggccaagctggcgctggatatcgccaacaaaacgctaccgctgtttcgccatgtcaatagcgagagtttacgcaaggtctgcgaaattatccgcgatgacattcacgccgatgcggtggcgattactaataccgatcatgtgctggcctatgttggcgtgggtgaacataactatcagaatggcgatgacttcattagcccgactacccgtcaggcgatgaattacggaaaaatcatcattaaaaacaatgatgaagcccaccgcacaccagagattcattccatgctggtgatcccattgtgggagaaaggggtcgtgaccggaacgctgaaaatttactactgccacgcgcatcagatcaccagcagtttacaggaaatggcggtcggtctgagccaaatcatctccacgcaactggaggttagtcgcgccgagcagctacgtgaaatggcaaataaggcagagcttcgcgccctgcaaagcaaaattaatccccattttctgtttaacgctctgaacgctattagtagcagtatccgtctgaatccggataccgctcgccagttgatctttaatctgagccgttatctgcgctataacattgaattaaaagacgatgagcaaatcgatatcaaaaaagagctgtatcaaattaaagactatattgccattgagcaggcccgctttggtgacaagctgacggttatctatgatattgatgaagaggtgaattgctgcattcccagcctgctgatccagccgttggtggagaacgccattgtccacggtattcagccttgcaaaggtaaaggcgttgtcaccatcagcgttgcagagtgcggaaatcgggtacgcattgcggtgcgagataccgggcacggcatcgatccaaaggtgattgagcgggtcgaagcgaatgaaatgccgggcaataaaattggcctgctgaatgtccatcatcgcgtgaagttattgtatggcgaggggctgcatatccgccgcctggagccggggacggaaattgcgttttacattcctaaccaacgcaccccagtcgccagtcaggctacgttattgctttgagccggagtgatattgtgaaagtcatcattgttgaagacgaattcctggcacaacaggaactgagctggctaattaaagagcacagccagatggagattgtcggcacctttgacgacggtctggacgtgttgaagtttttgcagcataaccgcgtcgacgccatttttctggatatcaatattccgagcctggatggcgtgttgctggcgcaaaacatcagccagttcgcccataaaccgtttattgtgttcatcaccgcgtggaaagaacatgcggtagaagcgtttgaactggaggcgtttgactacattctcaaaccgtatcaggagagtcgtattaccgggatgctgcaaaaactggaagcggcctggcaacaacagcagaccagcagtacgcctgccgcgacggtaacgcgtgagaatgacaccattaatctggtgaaagatgagcgaataatcgtcacgccaattaacgatatctattacgccgaagcgcacgagaaaatgacctttgtctatacgcggcgtgaatcctacgtaatgccgatgaacattaccgaattttgcagcaaactgccgccgagccattttttccgctgccatcgcagtttttgtgtcaatctgaacaaaatacgcgaaatcgaaccgtggtttaataacacctacattctgcgactgaaagatctggattttgaagtgccggtcagccgcagcaaagtgaaagaatttcgccagttaatgcatctttaatcgggaactttcatgaaagcaccaggcttgcccgccgatcaacaatttttcgccgatctgttcagcggcctggtgcttaacccgcaactactggggcgcgtctggtttgccagccagcctgccagcttgccggtgggcagtttatgtattgattttccccgtctggatatcgtgctgcgcggcgaatacggcaatctgctggaagcaaagcagcaacgtttggtggaaggagaaatgctgtttattccggcgcgcgcggctaatttaccggtcaacaacaaaccggtgatgctgttaagcctggtgttcgctccgacctggcttgggttaagcttttacgatagccgcaccacgagcttgttgcatcctgctcgccagatccagcttcccagcctgcaacgcggtgaaggtgaagcgatgcttaccgccctcacccatcttagccgtagcccgctggagcaaaatatcattcagccgctggtgttaagtttgctgcatctttgccgtagcgtggtgaatatgccgccgggcaatagccagccgcgcggcgattttctctatcacagcatttgtaactgggttcaggataattatgcccagccgctcacccgcgagagcgtggcgcagttttttaatatcacgcccaatcatctgagtaaactgtttgctcagcatggaacgatgcgttttatcgagtatgtgcgttgggtgcgaatggcgaaggcgaggatgattttgcagaaatatcatctgagtattcatgaagtggcacagcgttgcggttttccggatagcgactatttttgtcgcgttttccggcgtcagtttggtctgacgccgggagagtacagcgcccgttttcagggctaacgtcagaaggttaattctgtttccagcagcgtcaggatactttgtgcatcttgcgcggcaaacaagctctggcggaagtttttattcaccagtttacgcgccagctggctgaagactttcacatgattcatcccttcgttagcacccagcgtcagcatgatcaccagttcgacttcgcccatttcactctgccagccaatcggtttcgccagccgggcaatgctgatactggaatgacggatccactgagatttggtgtgcgggatcgctacgccaaaaccaacgccggtggtaacaatctcttcccgctgccagacatcttcttccagctcaaacggatgttcagtgcgcccgttaacgccgaggttgccgcacaggaactggatcgcctgctctttattgctaaaatcctgatcaacaaagatattctccagcgccagcagtgggcgaacgtcttcttccggcgtaaaggcggtgagtaacgcttcaatttcctgcgcactgcggcattcacatgcctgacgcgccagttcccgacacgcctcgctatccagttgacgaagctggcttttcaccgccggaatacgcgggctactcatactcagctcatccaggcccagcccaagcagtagcggcagataacggctttcaccgcccagttcaccgcaaatgcctacccatttgccccgctgatgcgcagtggtaactatttgctgcaacatgcgcaggaagcttggcgtaatcgggttatatagcgggcttacgcgcgggttattacgatcgaccgcatacagatactgggtcatatcgttggagccgatactgaagaaatcgacctcatcgcagaagtggtcgatgatgtagcacacgctcggaacttccaccatgatcccaagcgtaatcgtctctgcatgacgcaggccatcgcgcttaagctcaacgatcgctttttggatctcgcctttcacccataagatctgatcgaggctgtgaaccatcgggatcatcaactgggcgttgccgaaactggcggcgcgcaaaatggcccgcagttgagtgcggaacaggccagcaaattccgggtaaatacgtaccgcgcgatagccgaggaacgggttctcttcctggggaatattcagataaggaatgcttttatcgccgccgatgtccatcgtgcggaagataatcggcttgtcgcccgccgccagtagcacctgctggtaggcttcaaattgctcctgctcgtccggcgcgctgtcgcgatccatatagagcatttcggtacggaacagcccgacaccttccgcgccgttggcaaacgcgcctggcgcttccagagcggtgccgatattcgccgcaatatcaatacgcttgttatcacgggaataggccagctgcgcggcagcctgcgcctgttgtttttggcgtttatccgccagcgtctgcgcgacctgataataaccgctcaccgcgtcattcgggttaatcgccagcacgccgcactgggcgtcaagcactgcaggttgcccggcataacgggcaatcgcatccagcggcaagccactcagtaccgggatcgcgctggcacgggccagaatcagtgtatggctggtgcgcccggttttctccagaatcatgcccgcaagatttttcaaatcaaggctcaaaaactggcttggggttaaatcttcagccaccagaatggtcggtttttcaagcaccagcttgttgcgcggcttcagttccggccaggtgatatgcagcaactgttcgctgatatcgcgaatgtcgctaacacgttcgcgcagataatcgctggcagaggcagaaagtttggcgcaaacctgctccatattgctgatgatcgccgcccccagcccctgatgctgttctgtcatcaggcgacggatattgcctgcaaattcatcatcctgaatcaggctcaaatgggcgctgaggatagttttgctttcgccgtcacgctcacgcaattgctggttcagttgctcggcaagcgttgccaggctgtgctccagccgggtggaatcttgcgcactggcggggattgcccgataactgtcgaggctgtcgctttgtaacagggtcagcgtacccacgccgacgccgcttgccagcacattgccgtacagtaaatccgggttaaggcggcttaaactacgcggcagcggatgcgccgtcagttctgcctgcgtaggctgaacgctgtcgctgtcgataaagcgcacctggatgtactcttccagcacgcgccgcgcctgctcttcatcgctgccgctaatgttcaggctgcaactgtcattaaatagggtgccggtgccaatcagcgccaggctgcttttcgcatctgcctttgcgttctggcgatggttaataaaagtgatttcgctttgccactggctgcactgttctttaagttcccacgccggacgagcatgtagaccgttaggcaaaggacagagaaattgaatcgttaacataaccgctccgggttaatcaggagatcatctgaaatccgtcagttgaacaaccgtctcacgcgtaagacgttgaataagggcagataaaagttgctgcatctgcaaaatgtcgcggcaatcggcaatgcttgcggcgcaatgtccatggcgggttgctggccccatcaccactgtgggcacgccggtgccggttaagtgcaccgccccgccgtccgtgccgccgttgctgaacatatctgcctgcaacggcacgccaatttctgccgccacggtttcgacccaggcggtaagttttggcggcgcaatcaggctcttgtcgcttaacaccagcatcggcccgttaccaatctggcgatggttagccgcgccataatcaaagtttttcgcccagcaggcggtatcaagcacaatggcgacgtccgggctcaccgcgcgggtggcagtttgcccgccgcgtaatcccacctcttcgctggaacttgccaccagccacacttccgcaggtagttcggcgtcgtgcagttcgcgcagtaacgtcaccagcagatagcaaccgaggcggtcatcaaaggctttccccatcactcgctggtgagggagaacctgaaaagtggtatcaaacgtgacgcgatcgccgggacgaattcccgcctgcatcacttcgtcataggagcgcgcaccaatgtccacgcgcatggcgctgacgtcattcccctgccggtcgccgtcaagcaggcctggaattttgcactcttcacgggtggtgatgcgcaccggctgcagctggcgggcagccatgcgtacgttgccaaccggcagcacatcaatcgccccttcgcgggagatgctgcgcaccataaatcccacttcgtccatatgcgcacagatcatcaccttcggacctgtgctttcattcaggcggatcagcacgcttcccagaccatcaaatcgcacttctttttgcaggcgatccgcttcttccagcaggatctgccgcacttcctgttcgctggaggcgatcgcatctgcctcgctcaacgcttttaataggcttaaatccattatgcctctcccgtgagcaacactgttttcggcatggcgtagagcacttctgcgccttgcggggtaaccagcacaacatcttcgatgcgcacgcccccttgccctggcaaataaatccccggctccacggtcagtaacatgcctggctgtagcgtcgtggtgtcccgcggactaaaacgcggatcttcatgaacttcaatgccgatagcgtgaccggtgttatgaccgaaatagtcgccataacctgcttctgtaatgacccggcgcgcggcatcgtcaacctgctggcagcgcacgccggggcgaatcgcggagattgctgcgagctgtgcctgcaggacaatttgatagacgttaaacagcaggtgagattcggcgctcaccccttcgccattcaccagcaaggtgcgcgtcatatcagagcagtagccctgatacagcgcaccgaaatcgagagtgacaaactcgcccgctgcaacaatcttgtcgctggctttgccgtgcggcagcgccccacgccagccactggcgacaatggtgtcaaaagaggctttttctgcgccctgctggcgcataaaccactccagttcagcggctatctcgcgctcgctcatccccgcctgaataaagcggcgaatatgctctgcaccgcgatcagcaatcccacaggcgaggcggattttctccacctcctctggcgttttgatttgccgcagcacatccggcgtggcgctaaccagtttcgcattgagttcagactgccagcggtgcgcggtttcccaactcacctgctggccctcaaaaccgagcgtttgcaactgttcatcggcaatgatttgattgacgatagtggtaagcgtgttcgtcgcgtcaagcaaatgcagctggtagccttgcgcacgggcttccacctcaacgtaatagcggctatccaccagaatgtgcgcactttcacggctaatcaccacataaccacttccggtggagatccccagatgcggctgtttgttctgccgactggagagaagcactgcatccagttgttgcgccttaagccagtcgcgcaggctagcgagtaatgtcatctggattttccttcttacaggctatcgattaacaatttgcctttacggaacatcatcagacgcaggaacaccaccatcagcgcagttatgactgcccccagcgcgatccccgccatatagacgcccaggttagtgaccagcggccatgcccagatagcggactccgggaaccattgcactgcgcccagccagacagcggcggtactgccgacaatagcgccgaccatatagctcggaatggcggtgatggggctttccagcgcaaacggaatcgcaccctcactgatccccataaacgccaggaacatggcggtcttaccctgcggataaagttgagcgttgaacaggcgtttgccggttaaacgacggtcgataatggtcgccagccccagaccaatcggcggaataacgatagcgatagaacgagcggtgaccggtaatacgtggtcagtggtaaagctgaaggcaacaaaacctgcggctttgttgatcgggccaccaaggtcgattgctgtcgccgcggcgatccccattgcgtacatcagcgcgcccttctcacctgcggcagtcagcacagtacggataccgccgttgatccagccaccaaagggggtgatgacgtagtacatcgccagcatgacaaaaatggcggaaagaatcgggagcaaaaatgtggttttgaacgctaacaggaaatccggtaactggattttctggttcatccacttcacaaggtaaccggcaacgatagaaataatcagcgcaccaatgaaggtggacggcaccgggctagaggtcgcccattgcatagtgctgggatcgaagttcagcagttgcgtcggctgggtagacatcaacccgccgataaaaccagccgggaacgccagtttgccaccgatagagttcgccacaaaagcagcaaacatcggaatggcaaaaccaaacaacacgccgccgaaggactggctcagccaggcaaatttaagtaaggagaggtcgaaaccggagaatttcccgctattaagagcatccatgatgccgatctcagcaggaattttaagccagctataagcaatcagctggctgaaagcgaggatcacaccgcccataattaaggtcggcaccatgcgactaatcccactcatcacatgctgcgggagttcaccccagaagctggttttagaggcctgcggattcttaactgccgctgccgcaccggatgcgccaggcacaacggttgcactgcgttttttaatggccataacaattatccctgtcgaatattactgttgttcagaggcaatcatctcttcgatttctttgatgatgcccgcagcgtttttaattgcgtcctgcaaagtgatttcataaacgtcgcgactttcgaaacgttcgttatcttccggggtaactgccacggagtggatgatgatggtcgcttcggcgatatcctgcgccgtcaggcgattctggataccgtccgcgccctgggtttcaattttcacttcataaccggcttctaccgccgcttcttccagcgcctgagcggccataaaggtgtgagccaggcccatcgggcaggcacataaggcaatcagtttcttactcatcgttaattcctcgttcagtgatagttgacgagtgaaattatgaacgtgcaaaacaaatcgccgttaccagacaaataatgcatttactggagaattaatcccgctgtacggaagtgtgacgcaggtcgaccttgtgaggggacacaaagaaaaattgaataaactgtatgatttaaaagattatcgggagagttacctcccgatataaaaggaaggatttacagaatgtgacctaaggtctggcgtaaatgtgcaccggaaccgagaaggcccggattgtcatggacgatgagatacaccggaatatcatggacatattctttaaagcgccctttatcttcaaatgcggcacggaaaccggaggctttgaagaactcaaggaagcgcggcacgataccgcccgcaataaacacgccgccaaatgtcccgagattgagcgccagattgccgccaaaacggcccataatgacgcaaaacaggctcaatgcgcggcggcaatcggtgcagctgtcagccagcgcgcgttcggtaatatcttttggcttgagattttctggcaggcggttgtcagctttcacaattgcgcgatacaaattcaccagcccagggccagaaagcacgcgctccgcgctaacatgaccaatttccgcacgcaatatttcgaggataatggcctcttcttcactattcggcgcaaaatcaacgtgaccgccttcgcctggcaagcttacccaacgcttatcgacatggaccagatgcgcaaccccaagccccgttccggcaccgtaaaccgcaataggcttaccttcgaccggttctgcgccaccaaactgaatcagatgctcttttttcagcatcgggatcgccatgcttacagcggtaaaatcgttaataatttccagatggctaaaaccgagattctttttcatttcggcaatactgaacgcccaggtatggttggtcatcgccacccagtcaccggtaattgggcaagcgatggcaatacagccgtctttcacctcgaccttatgttcttcaagataaacgcgaatgaccgcttcgaggctggggtaatcaagcccactataggtcttagcctggctgatttcaccactggcaatatcacacagagcaagacgtgcgttggtgccgcccacatcaccgactaatgcatactttgtcattcttcaactgctccgctaaagtcaaaataattctttctcacactgtaaatacctgggggcataacaacaacgccggaaaggcaggctccctgtaaatatcgatctgggtcacacaattactttatcgtttcagcaccaattgcagcgatgcctttttgcaagctgggcaaactaagtatctgaccccgcataaggaatagaacacaggcggcactaacccggacgtagactgtattacaaaagcggcaaaaagcagagacaaaaaacccccgctttgcagcgagggttggaaatttggtggagctaagcgggatcgaaccgctgacctcttgcatgccatgcaagcgctctcccagctgagctatagccccacgatgcgtttacgtaccaagtttgctgggtgcaaaatttggtggagctaagcgggatcgaaccgctgacctcttgcatgccatgcaagcgctctcccagctgagctatagccccgtcacgtaaagcttgtcgagttgacgggcggcatcatatgaattccgcccgaatgtgtcaacggcaaattgcaacgtgtagtttcaatcgctgaaaaatcaggcaaatgaacaattttggaaaaccgctcgcattcagtagttattcatgtcacggtttcctgtaaagtggtgttataaaatgaactactaatagacccacatacattcagggaattgttatgttcaaggagaggatgacaccagatgaacttgccagactgaccggctatagccgccagaccattaataaatgggtacgcaaggaaggctggacaacgagtccaaaacctggcgtccagggtggcaaagcccgactggttcacgtcaatgaacaggttcgtgaatatattcgcaatgctgaacgtccagaaggtcagggagaagcgcctgccctttctggtgatgcgccgcttgaagtattgctggtgacactggcgaaagagatgacgccagttgaacaaaaacagtttacatccttgcttctgcgggaagggattatcggattgttacaacgcttagggattcgcgatagcaaataatatgaaaagattacgcaataaaatgaccaccgaagaactggctgaatgcctcggtgtggctaaacaaactgttaaccgttggatcagagaaaaaggctggaaaacggaaaaatttcccggcgtgaaaggcggtcgtgccagacttattctggtcgatacgcaagtttgcgagtttattcagaacacgccagccttccataacacaccaatgttgatggaagctgaagagagaattgctgaatacgctcctggagcacgcgccccggcgtatcgacaaatcatcaacgcgatagataatatgacagacattgagcaggaaaaagtcgcgcaatttttgagtcgtgaaggaattcgcaatttcctcgcccgtctcgatattgacgaaagtgcataaataaaaaacggcaggatattatctcctgccgtttatctttttacacgctaattactgctgattttcgcgttcagcaataaaatccagcgctttgttgatacgctcgatactgcgggtcttaccaattgcgtgaacggtaacatccagtgctggagactgccccgcaccggttacggcgacacgcagcggcataccaactttacccatacccacttccagctcatccgccgtcgcctgaatagcgtgatgaacgttttcagcggtccagtcagtaatcgcggccagtttgtcacgaaccacttccagcggctgacgcgctaccggacgcagatgttttttcgcggcgtcggcatcgaactcagcaaaatcttcgtagaaataacggcagctctgtgccatctctttcagcgtcttgcagcgttcgcccagcagtttcaccagatcagccagctgcgggccgttacgggtatcgatattttcctgctcaatgtgccactgtaagtgagtagcaacatactccggcggcagcgcgttaatgtagtgatggttcagccacagcagcttgtcggtgttgaacgcactggcagatttgctgacggcattcaaagtgaagtatttgatcatctcttcacgagtgaagatttcctgatcgccgtgggaccagcccagacgcaccagatagttcagcagtgcttctggcaaataaccgtcatcacgatactgcattacgctgactgccccgtgacgtttggacagttttttaccgtcatcgccattgatcatagaaacgtgcgcgtaaaccggcaccggcgctttcagggccttaagaatgttgatctggcgtggcgtgttgttgatatggtcttcgccacggataacgtgggtgatttccatatcccagtcatcgacaaccacacagaagttataggttggggaaccatcggtacggcggataataagatcgtccagttcctggttgctgaactcgatcggaccacggatctgatcgtcaaaaacaacagaaccttcctgcgggttagcaaaacgtacaacacacggttcatcatcagcatgatgctcatggctgtggcggcagcgaccgtcataacgcggcttctcacctttcgccatttgctcttcgcgcagcgcttccaggcgctctttagagcaatagcatttataagcagtgccctcttccagcatctgatcgatcaccgcgttgtagcgatcaaaacgtttggtctggtagtacggaccttcatcccactccaggctcagccagttcatgccatccataatggcttcgatagcttccggcgtggaacgctcaagatcggtgtcttcaatacgcagcacgaactcaccgccgtggttacgtgcaaaaagccaggagtaaagagcagtacgcgcgccgccaacgtgcagatagcctgttgggcttggcgcgaagcgagttttgattttcatgaaatggccttacgtttagaaagatgccgacaaccggcaaatcctggaaaaattaagtgggcgatattctatcactcccgcctgattcctcaatgtagttcgggtttctaccttacgcattattgttttcgttgacaaattgcgcaacacggtctgttttgcgatcatcttgcttaaatttacgacgaacgaacaatttctttagaaaatgcgttgactcattttgaactctccctataatgcgactccacacagcgggggtgattagctcagctgggagagcacctcccttacaaggagggggtcggcggttcgatcccgtcatcacccaccaactactttatgtagtctccgccgtgtagcaagaaattgagaagtgggtgattagctcagctgggagagcacctcccttacaaggagggggtcggcggttcgatcccgtcatcacccaccactttctcgccagctaaatttcttgtaaaaatgtgaagtaccgaagtgggtgattagctcagctgggagagcacctcccttacaaggagggggtcggcggttcgatcccgtcatcacccaccacttcgggtcgttagctcagttggtagagcagttgacttttaatcaattggtcgcaggttcgaatcctgcacgacccaccaatgtaaaaaagcgccctaaaggcgcttttttactatctgcgatactcaaagattcgaacctgcagcaggtttgagttgagcgcagcgaaacaacggagccgctcgtgctggcgacggcccgaagggcgagcgaagcgagtcatcctgcacgacccaccaatgtaaaaaagcgccctaaaggcgcttttttgctatctgcgatttgcgaaattgcctgatgcgcttcacttagcagactactatttccggcaattcctgtctcctcacttactgtgtcaatgcagccaacagcttaaccatcgcgggcgtcacctgctgtgtttcataaacaatatataaatctgcagggatgcgctgtttgagcggacggaaaatgacacctggccagttcatttgtgcgtagctgtccgctatcaatgtgataccaatgcccatactgaccatagcgagtaccgtttgcggttcattaacttcgcgaataacaaccggactaaatcccacctgctggcaaactcgctgcaaaaaatcccagtcagtgtaaacgggcggcattgtaacaaaatactcgtcacgtagcgcttccagcgggacggtggaaaaactactgagatgatgctcttcaggcatcgccaccagaaacgcgctttcatgcaaccgtaagctggtaaaaccagtcggtggttctgtcgccattcgccagatcccggcatcaagttcgcggcgttccagcaaggccatttgcatcgcgggcatcttttcgcgaaaaagaacgtcaacgttaggattttccctgaggaatcgccgcataaccgggcgcatccgtccccacattgccgttcccactacgccgagttcaatccgccctgcttctccccgacctatttgttcaatccgagccaatacattattagcattcaccagcaatcgacggctttcttccatcaagattttgcccgcgtgtgtcagtacgacgctgcggctatggcgaataaaaagctgcgtgccgagttgattttccagctctttaatatgaatgctgagcggaggctgagacatatttaaacgcgctgctgcgcggccaaaatgcaactcttccgctacggcaagaaaataacggagcaacttaagatctgttctgtatacgcgttccataattaagtgctccatataataaatacatcgtattaaattatcatggcataaagtatttcaccaccagatatccgacatacataaacacaatggataatatacccggtaatacatttggtacaggaataggcaagcgcacgattgtaaacaaagcaccaataccaaaaccaacgccggaagaaaataaaatatctttcactaattaacctttatcataaaagcagctctgaagagcagagccgcgaatccttttaatgagtcaccgctcgatgctttatcttttcagggtcatgattatatttaaacccaaagaaaaatatcactgcgagaaaaagagcatatcctgcaaacaccagccagatagtttgccagtcttttacgccatccacgctaaagtaatctactgccatgccactcagaatgctgccaacccatgcgccgacaccatttaccatggtcataaagagcccctgcgcgctggcacgaatgctggaatcaacttcctgttcgacaaatacgctaccagaaatattgaagaaatcgaatgcacagccataaacaatcatgctcagcagcagcaaaataaatccggttgtactcggatcgccataggcgaagaagccaaagcgcagcgtccaggccaccatactcatcagcatgacggttttaatgccaaatcgctttaaaaagaatgggatagtcagtataaagcccacttctgccatctgactaacactcagtaaaatggagggatatttcaccacaaaactgtcagcaaactccgggttacgggcgaaatcatgtaggaacggattaccaaaaacgttggtaatttgcagtaccgcacccagcatcatggcaaagaggaaaaagatggccatgcgtggatttttaaacagcacgaaggcatccagacccagcttgctggcaaggcttgtggtcgcttttttctccgcaaccggaatcttcggcaaagtcagcgcataagcgctcagcagcaaactcgcaccggacgcgatatacagctgcagactactcaattccagatgcagcaggcttactgcccacatcgcgacaatgaaccccaccgtaccaaaaacgcgaatgggcgggaaagcggtcaccgggtcaagccctgcctgggcaagacaggaataagagacgctgttgcttaacgcaatagtcggcataaacgccatcgcattgactaacatcacccaaaacatcatatccggatcagttacggatgccgcataaaaaagtacgcccgcacacaccaggtgacacagcatgtatgcacgttctgcgcgcagccatttgtctgcgatgatccccattataccaggcataataatcgcggcgatccctttggaactgtaaaccatgccaacattagcgccggtgaaatgaagagtattaatcatgtaagagccgagggtaaccagccagctcccccagataaaatattgcaaaaaggacattacctttaagcgcatcgcgatgctcataatcgtttccttgtcgcatcatttggcctcacccgcgaggccgtttcttattgtttttctcaggcaattttgcgcagaaagccacaaataaggttgatgaagttctgcttagagagctccgcagccgccagcgtttgcgcatgactcaatttcacatcgcttaaaccttccgccatattggtaatcgcagagaccgcaacgactttaaggtcgcaatggcgagcactaataacctcaggcaccacagacataccaacaacatccccaccaataatttgcatcatgcgaatttccgccgcagtctcgaaattcggccccggatagctgacgaacacgccctccgtcagagggaaaccctcttctttcgccactttttgtaacagtgcgcggtattccgcatcgtaggcatttgccagactgaagaagcgctctccaaaacgatcatcgttaagacccaccatcggcgtaccgggcatggtgttgatatgatctttcaatgcgaccaggctgcctgcccccacttccggacgcaggctgcctgccgcattggtgcagaacagtagctcgcagcccagcagcttaaaggtacgaattgcgtcagtcataatggtcattccacgaccttcgtagaaatgtccgcgacctttcatacataccaccggtacgccctggagatggcccagcactaactcccccgcatgaccatgtaccgtacttaccgggaagcccggcagcttttcgtaggaaattgcgacagcgttctcaatctgatcggccagcgcgccgagcccggaacctaaaataaaggccactcgtggcgtgaaatcaggtttataagtcttgataatatctatgcaaaacagcgggttatgagaaaattgaacctgagacatacatatcctttttctgtagggtggaatctaacgcctttttatagcgaggttgtcccggctcttaccaatacacttttctcacgcattcaatagcgattcgatatcgatggatttatatcttttctctattaatccacggtaaaaactgtattggcgatattaattcctttgcattaacaatatgtcgtttttagcaaaccactttattaagcaatctactaataacgatcggcatagggaattatgctatgaaaaaacatcttttaactctgacactttcctctatattagcgatacctgttgtatctcatgcagaatttaaaggcggttttgcagatatcggcgtgcattatctggactggaccagccggactaccgaaaaaagcagcaccaaaagtcacaaagatgattttggttatcttgaatttgaaggtggcgctaactttagttggggagaaatgtacgggttcttcgactgggaaaacttctataacggtcgccataataaaccaggtagcgagcagcgttatacctttaaaaataccaaccgtatttacctgggtgacaccggatttaatctctacttgcatgcgtatggcacctacggttctgcgaatcgcgtgaatttccacgacgatatgttcctgtacggtatcggctacaatttcaccggcagcggttggtggttcaaaccgttctttgctaagcgttatacagatcaaacctattacactggcgacaacggctatgtcgccggctgggttgcaggttacaactttatgctgggcagcgagaaattcactcttaccaactggaacgagtacgagtttgaccgtgacgctacctatgcagcgggtaatggcggtaaagaagggctgaatggcgcagttgcactgtggtggaatgcaacaagtcacattactacggggattcagtatcgatatgcggatgacaaactgggcgaagatttttaccaggatgcgataatctactccatcaaatttaacttctgattgattactgccggggctcccggcagtatgaattcactttatatctgatacaacggatccccttcccgcccagccattagcgcattgccctggtctcgtaccacgtcccataaagcttcagcggcggtggaaagactacggttcttcctgcgcaccagcatcaactggcgttcaacaaccggcgtaatgcgctttaccaccagtgggctaccttcaggcaatggtagcgccagtgcgggaagaatactgatgccgatgcctgcggctaccatcgggaacagcgtcgccggatgtccaatctcctgcacaatattcgcctgaataccattgcgcgccagcgctgcgtcaatcagcggtcggctgccactcgcgtaatcctgcaacaccaatttcgctccctgtaatgcctgccagggtacataatcttccacggccaaagcgctatcgcgatggcaaagcagaaagaaaggctcggaaagaatcgcttcacattgcagatcgcccactgggcctggatcgatgacgatgccaaaatcgacatctccctggcgaatactttccattacccactgctgcggacgatcgtgcaggacaaactgaatatctggatagcggcgatggctttcagcaatgcattgcggaataagatgcgcggaaatggtctggctggcagcgacccgaacttttccgctcagttgttgccccatacgcccggtatcgcgcaacgtgctgttcagttcatccagcagtcgctcaagacgcaaagccagctgctgccctgcatctgtaagcaccacttcacgcgtggttctgtccagcaggcgaacaccagtatgattttccagttccttcacactgtgactcactgcgctctggctcaggccgatacgctctcctgcacgactaaaacttttctcctgcgctactgtgacgaaaacctttaattgttttaaagaataattcatctgttttcttcatgaatggatgcaataaatcaattttatttctcaaactggaagaagcacaatagaaccatcgatcatctggagtctttatgaaactttttcgtatcctcgatcctttcaccttaaccctgatcacggtggtgttgctggcctctttctttccggccagaggcgatttcgtccccttctttgaaaatctgaccaccgcagctattgccctgctgttctttatgcacggcgcgaagttgagccgtgaggcgattattgctggcggtggtcactggcgactgcatttgtgggtaatgtgcagcaccttcgtgctgtttccgattctgggtgtactgtttgcctggtggaaaccggtaaatgtcgacccgatgctctactccggttttctctacttgtgcattctcccggctaccgtgcagtctgcaatcgccttcacgagtatggcgggcggtaacgtcgcggcagcggtttgttctgcgagcgcatccagcctgctggggattttccttagtccattgctggttggtctggtgatgaatgttcacggtgcagggggcagccttgagcaggtcggtaaaattatgctgcaactgctgctgccgtttgtgttggggcatctttcccggccgtggattggtgactgggtgagccgcaataaaaaatggattgcgaaaactgaccagacgtccattctgttggtggtttatacagcgttcagcgaagccgtcgttaatggtatctggcataaagttggctggggaagtttgctgtttatcgtggtggtcagctgcgttcttctggctatcgtgattgtagttaacgtctttatggcacgccgactgagcttcaataaggcagatgaaattactatcgtcttttgtggtagcaaaaagagtctggcaaatggcatcccgatggcaaacattctgttccccacaagcgtgatcggtatgatggtgctgcccctgatgattttccatcagatccaattgatggtctgtgcggtgctggcgcgtcgatacaaacgccagaccgaacagttacaggcgcagcaggaaagcagcgccgataaagcttaaagcggacgcttcaggggctggaccagttgcgtcagcccctcggttttaatcagcagcgtgatttgcattagctcaccgagcttccctgccgggaactcatctttgcgggcaaaccacagcagatactcctccggcaggtcgattaagcgacgccctttgtatttgccaaacggcattatcgtattggctatttcaatcagctgctctttttccatctcagctacccagcaaacgcagcatttccgcttcgtcgatgacttcaatgcccagttcctgcgccttcgccagtttagatcctgcagcttcacccgctatcaccagatcggttttcttgctcacgctgcccgcgactttcgcgcccagttcgaccagtcgagctttagcgtcatcacggctcatctggcttaagctgcccgtaagcaccacggttttaccagcaaacgggctgtcaatctcttccgcgttgataacgatcggcgcaggccagtgaacaccttccgccaacagctcgctgatgacattgcggttgctttcttcggcaaagaagttgtgaacgtgggatgcaacgacaatgccaacatcaggcaccttttgcagctcttcaatgctagcggcttccagcgcttccagcgtgccgaaatatgccgccagacctgctgcggtggcctcgccgacttcacggatgccaagtgcatagaggaagcgagcaaaggtggtttctttcgctttttccagcgcgttaaccacgttttgtgcgctttttggccccatacgctccagtccggtcagtttgcctgcggtgagtttgaacagatctgccggagtatggacatattctttttcaaccagctgatcgatgattttgtcgcccattccgtcaacatccatcgcacggcgggaaacaaagtgtttcaggctctctttacgctgcgcaccgcaaatcaggccaccggtacagcgggcaaccgcttcaccttccacacgctcaacgtcagaaccacataccggacaatgcgtcgggaatacaacctcacgggtatcttccgggcgttcagaaagcacgacgttaaccacctgcgggatcacgtcgccagcgcggcgaatcaccactttatcgccaatgcgtaaaccaagacgttcgatttcatccgcattgtgtaaggttgcgttactcaccagcacgcctgcaacatggacaggttccagacgcgcaacaggcgtaatcgcgccagtacgcccaacctgaaactcgacgtcacgcacaaaggtcatctgctcctgcgccgggaatttaaacgctaccgcccagcgcggggcacgcgcgacaaagccaagctgctcctgctgtgccagactgttgaccttaatcaccacgccgtcgatatcaaagcccagcgtcgggcggtcttcttccactttgtgatagaacgccagcacttcttccgcgctttcacaaagcgttacccgatcgctgaccggcaacccccactttttaaattgcagtaaacggccaagatgagtatccggcagctcgccaccttccagaacaccaacgccatagcagaaaaaagtgagcggtcgcttcgctgtaatacgcggatcaagctgacgcagactaccagctgccgcattacgtgggttagcaaacactttcccgcccgtgcgtcgcgcatcttcgttaatcttttcgaaccccgcctgcggcaggaacacttcaccacgcacttccagacgcgccgggatattctctccgtgcagcttcagcggaatggcgcgaatagtacgcacattagacgtgatatcttccccggtggtgccatcgccacgggtcgcggcactgactaaaacgccattttcatacagaatactgacggcaagaccatccagcttcagctcacagcaccaggtgactttctcgttgtttttcagacggtcctgcacacgtttgttgaaagcaagaaagctttcttcatcaaaaacgttatccagactcagcattggtacttcatggcgtatctggctgaaagccgccagcggcgcagcgcctacacgttgagtagggctatcaggcgtaatcagttctggatgtttggtttccagctcgcgcagttcgcgcatcagcctgtcgtattcagcgtcgggaatttccggcgcatccatcacatgataaagatattcatgatggcgaagcgtcgttcgcagttctgtcagttgttgttcgatactttccatatcgcaccatcaatgctaaaaacccccgacaagcgggggttcgaagaggagttaatttgccttaagtgtatcaggcgttggcgtctttgacttcgcggatgatgtcctggtactcgcgcaatttctgcggagtcatcatacggcgctgatcgtcaagcacgacaccgcccacttcatcggcaatatgctgcgcagattgcagcatcagcttgaagttctgcagctcgtcaccgtaagacggtacctgcataaagatagtgacacccggagtagtgaaatccttcatttcaggatcaaaggttcccggtttcaccatattcgccaggctgaataacgccgggccgctgccatccgggctaagatgacgatggtaaatattcatatcgccaaaaatgaagcccgcttgttgaatgctgttaagaagcagttcaccgtttagctcgctaccgtgatgcgccgcgacgttcatgataatcaccgcttctttgcgcttcggtttatccataactggagcaggttccgctacaggctcaggctgtggtgccgctacgggttctgcaggctggaaagcctgttgtgccggttgcggtgcactatgcacaggctgcggcgctggcgcgacctgtgggctaactggctgctgcaacggctgttcaggctgcggctgataggcaggctgctgcaccggctgcgctggatgcggagcatgttgcggcggtacctgcgcttcaggcggctgctggaccggttgacgcggctgcgcagacgcataaggcggttggtactggtgttgcgggctcggacgagcagcctcatgctcctgagcgttagccggggcatgattcacgcggtgaacacgaacctcaccaacgccctcatcatcttcgacatcctcgtcataagaatcgtcgtcacgtttactcttcattcgttttaatggccgatcgcggaacatagaagatcgttctttacggctggtccagaaaccatgtaccagtaaagcgattatggcgatcgcgccaacaatgattaatatcagacgcaaatcctgcatcattatattctctgttgttctaacaccttgccaccacggcaaacatttactcactaagagtatttgccgattacctcaagtgcaagtgcactattaactttcacagcacaaagatagatgaaatcgtgctttttgctgttttttcgaacatatcctaactgtccattgcgcaattacccggtaaaatacgcagaattttcctgggattggtcaaaaggagctcatcctgattatggttagtagtttcacatctgccccacgcagcggtttttactattttgcgcaaggctggaagctcgtcagccaacctgggattcggcgtttcgttattttaccgctgctggtcaatattttgttgatggggggcgcattctggtggctctttacacagctcgatgtctggatcccgactctcatgagttacgttccggactggctacaatggctgagttatctgttgtggcctctggctgtcatctctgtgctgttagtgtttggctatttcttctccacgattgctaactggattgccgctccgtttaacggtttattggctgaacaactggaagcacgattgactggcgctacaccgccagataccgggattttcggtatcatgaaagatgtgccgcgaatcatgaaacgcgaatggcaaaaatttgcctggtatctgccgcgcgcaattgtattactaattctttacttcatccctggtattgggcaaaccgtcgcgccggtactgtggttcctgtttagcgcctggatgttagccatccagtattgcgattaccccttcgataaccacaaagtgccgtttaaagagatgcgcaccgccctgcgcacacgcaaaatcaccaatatgcagtttggtgctttaaccagcctgtttacgatgatcccgctgcttaatctgttcatcatgcccgttgccgtttgtggcgcgacggcgatgtgggtcgattgctatcgcgataaacacgcgatgtggcggtaacaatctaccggttattttgtaaaccgtttgtgtgaaacaggggtggcttatgccgccccttattccatcttgcatgtcattatttcccttctgtatatagatatgctaaatccttacttccgcatattctctgagcgggtatgctacctgttgtatcccaatttcatacagttaaggacaggccatgagtaagatttttgaagataacagcctgactatcggtcacacgccgctggttcgcctgaatcgcatcggtaacggacgcattctggcgaaggtggaatctcgtaaccccagcttcagcgttaagtgccgtatcggtgccaacatgatttgggatgccgaaaagcgcggcgtgctgaaaccaggcgttgaactggttgaaccgaccagcggtaataccgggattgcactggcctatgtagctgccgctcgcggttacaaactcaccctgaccatgccagaaaccatgagtattgaacgccgcaagctgctgaaagcgttaggtgcaaacctggtgctgacggaaggtgctaaaggcatgaaaggcgcaatccaaaaagcagaagaaattgtcgccagcaatccagagaaatacctgctgctgcaacaattcagcaatccggcaaaccctgaaattcacgaaaagaccaccggtccggagatatgggaagataccgacggtcaggttgatgtatttattgctggcgttgggactggcggtacgctgactggcgtcagccgctacattaaaggcaccaaaggcaagaccgatcttatctctgtcgccgttgagccaaccgattctccagttatcgcccaggcgctggcaggtgaagagattaaacctggcccgcataaaattcagggtattggcgctggttttatcccggctaacctcgatctcaagctggtcgataaagtcattggcatcaccaatgaagaagcgatttctaccgcgcgtcgtctgatggaagaagaaggtattcttgcaggtatctcttctggagcagctgttgccgcggcgttgaaactacaagaagatgaaagctttaccaacaagaatattgtggttattctaccaagtagcggtgagcgttatttaagcaccgcattgtttgccgatctcttcactgagaaagaattgcaacagtaatgccagcttgttaaaaatgcgtaaaaaagcacctttttaggtgcttttttgtggcctgcttcaaactttcgcccctcctggcattgattcagcctgtcggaactggtatttaaccagactaattattttgatgcgcgaaattaatcgttacaggaaaagccaaagctgaatcgattttatgatttggttcaattcttcctttagcggcataatgtttaatgacgtacgaaacgtcagcggtcaacacccgccagcaatggactgtattgcgctcttcgtgcgtcgcgtctgttaaaaactggcgctaacaatacaggctaaagtcgaaccgccaggctagactttagttccacaacactaaacctataagttggggaaatacaatgttccagcaagaagttaccattaccgctccgaacggtctgcacacccgccctgctgcccagtttgtaaaagaagctaagggcttcacttctgaaattactgtgacttccaacggcaaaagcgccagcgcgaaaagcctgtttaaactgcagactctgggcctgactcaaggtaccgttgtgactatctccgcagaaggcgaagacgagcagaaagcggttgaacatctggttaaactgatggcggaactcgagtaatttcccgggttcttttaaaaatcagtcacaagtaaggtagggttatgattagtggcattttagcatccccgggtatcgctttcggtaaagctctgcttctgaaagaagacgaaattgtcattgaccggaaaaaaatttctgccgaccaggttgatcaggaagttgaacgttttctgagcggtcgtgccaaggcaagtgcccagctggaaacgatcaaaacgaaagctggtgaaacgttcggtgaagaaaaagaagccatctttgaagggcatattatgctgctcgaagatgaggagctggagcaggaaatcatagccctgattaaagataagcacatgacagctgacgcagctgctcatgaagttatcgaaggtcaggcttctgccctggaagagctggatgatgaatacctgaaagaacgtgcggctgacgtacgtgatatcggtaagcgcctgctgcgcaacatcctgggcctgaagattatcgacctgagcgccattcaggatgaagtcattctggttgccgctgacctgacgccgtccgaaaccgcacagctgaacctgaagaaggtgctgggtttcatcaccgacgcgggtggccgtacttcccacacctctatcatggcgcgttctctggaactacctgctatcgtgggtaccggtagcgtcacctctcaggtgaaaaatgacgactatctgattctggatgccgtaaataatcaggtttacgtcaatccaaccaacgaagttattgataaaatgcgcgctgttcaggagcaagtggcttctgaaaaagcagagcttgctaaactgaaagatctgccagctattacgctggacggtcaccaggtagaagtatgcgctaacattggtacggttcgtgacgttgaaggtgcagagcgtaacggcgctgaaggcgttggtctgtatcgtactgagttcctgttcatggaccgcgacgcactgcccactgaagaagaacagtttgctgcttacaaagcagtggctgaagcgtgtggcagccaagcggttatcgttcgtaccatggacatcggcggcgacaaagagctgccatacatgaacttcccgaaagaagagaacccgttcctcggctggcgcgctatccgtatcgcgatggatcgtagagagatcctgcgcgatcagctccgcgctatcctgcgtgccagcgctttcggtaaattgcgcattatgttcccgatgatcatctctgttgaagaagtgcgtgcactgcgcaaagagatcgaaatctacaaacaggaactgcgcgacgaaggtaaagcgtttgacgagagtattgaaatcggcgtaatggtggaaacaccggctgccgcaacaattgcacgtcatttagccaaagaagttgatttctttagtatcggcaccaatgatttaacgcagtacactctggcagttgaccgtggtaatgatatgattagtcacctttaccagccaatgagtccgtccgtgctgaacttgatcaagcaagttattgatgcttctcatgctgaaggcaaatggactggcatgtgtggtgagcttgctggcgatgaacgtgctacacttctgttgctggggatgggtctggacgaattctctatgagcgccatttctatcccgcgcattaagaagattatccgtaacacgaacttcgaagatgcgaaggtgttagcagagcaggctcttgctcaaccgacaacggacgagttaatgacgctggttaacaagttcattgaagaaaaaacaatctgctaatccacgagatgcggcccaatttactgcttaggagaagatcatgggtttgttcgataaactgaaatctctggtttccgacgacaagaaggataccggaactattgagatcattgctccgctctctggcgagatcgtcaatatcgaagacgtgccggatgtcgtttttgcggaaaaaatcgttggtgatggtattgctatcaaaccaacgggtaacaaaatggtcgcgccagtagacggcaccattggtaaaatctttgaaaccaaccacgcattctctatcgaatctgatagcggcgttgaactgttcgtccacttcggtatcgacaccgttgaactgaaaggcgaaggcttcaagcgtattgctgaagaaggtcagcgcgtgaaagttggcgatactgtcattgaatttgatctgccgctgctggaagagaaagccaagtctaccctgactccggttgttatctccaacatggacgaaatcaaagaactgatcaaactgtccggtagcgtaaccgtgggtgaaaccccggttatccgcatcaagaagtaattcttgccgcagtgaaaaatggcgcccatcggcgccatttttttatgcttccgccagcggcggcaaaatcaattcatcgctctcatgctgctgggtgtagcgcatcacttccagtacgcgcaaccccgctcggtgcactgcatcggttaacgccttccctttcagcaagccactgatgagctgagcacaaaacaggtcgccagtccctttcaggtcggtttttacccgactatgggaaatgacattcacgctgtcggcagtgaccaccacaacctgcatctcctgattttcttcattaccggaggcgctggtaaccaccacccattttaatgtgtcactaagcagactttttgcggcagcaatggcactgtcgagatcgcggcaatttttaccggtcaggatttccaactcaaagatattgggggtaattccctgcgccagcggcagtaaatattgtcgatacgcttcgggaaggtcaggtttgacataaattccgctatcaatatcgccaatcaccggatcgaccatgatcaataggtcaggatggtctttgcgtagcgcagtcagccactcggcaaggattttgatttggcttgccgttcccatatagcccgtggttacagcacgaagttggcgcagcgcatcacgctcctgaagcgcacgcaaatagccgctaaaccattcgtccggaatcgcaccaccgtagaaagtgtcataatgcggcgtattgctcagcaataccgtcggcacggcaaagacattcaggccgttctgtttgatagcaggcacggcaatgctgttgcccacgctgccgtaaaccacctggctctgcacggcgacgatatccgcctgcagtgccctactcttatcgttaaacaacaacaaactactcatttaattttttctccttgccgatgatcctcatcgtaatccaaccgaaactttacctgattctggcagtcaaatcggctatcacaaaacaaggataaggtaattcaatgaagaaaatcatttgtctggtcattacactactaatgacactccccgtttacgcgaagttaactgcccatgaagaagcccgcatcaacgccatgctggagggattagcacagaaaaaggatttgatatttgtgcgcaacggtgatgaacatacctgctatgaagcggtttctcatctgcgtctgaagctcggcaatacccgtaaccgcattgacactgccgagcagtttattgataaggttgctagcagcagtagcattactgggaagccgtatattgtgaagatccccggtaagagcgatgagaacgcacagccttttttacatgcgttaattgcgcagacggataaaacggtgcctgcggaaggaaattaatccgctttgggaaggcatttacaggaggtaacatgaaaaaacgctttatttatcacgatgaaaaaagcaataaattttggtggatagattacgaaggggatagtttagctgtcaactatggcaaggtaggtagtattggtaaattccagacaaaagagttcgataatgaagaacagtgtctgaaagaagccagtaaattgattgccgcaaaaatgaagaaaggctatcaagaagatccaaagtttaacttcatggatcgctactattttgatgatgaagaaattgggttacatgttaaaacgagtcacccaaacttccagtgccattttactgatccactttatatgtgttgctgggatgaagaatctccttttggcagcgatgaaggtgctgatgctctaaacgttcttgaaaatagcctccgtaaagagccggatctggactgtgctgatttccctcaaatgttaattgaaactatgtggggtatgaaatacatcgctatggacagtattcttgaagaggatgttcgtgcgcaattactagtcgatgaaatgagcactatccagagcaatatgattacctacgcaactgcattcggtcagattaaagtcatgggtaaaatctcccataaacttaaaaagatgggactcaatgcactagcgcgtcatcagcttaccgcaaaaattcttcaatggggtgacggtcaggacagtccaatacttcaaaaaatgattgatgaccttacggcgtttcctcacgaaaattaaatactgcatttgtcggcagcaacaactgttaaaaaagtgcgctttgtttatgccggatgcggcgtaaacgccttatccggcctacaaaatcgtgctaattcaatatattgcagaaaccttgtaggcctgataagcgtagcgcatcaggcagttttgcgtttgtcatcagtctccgatgctattaatccttaaatccccgccccctggctaaaatgctcttccccaaacaccccggtagaaaggtagcgatcgccacgatcgcagatgatcgccaccaccaccgcgtcagggttagcttttgccacccgcagtgctccggcaaccgcgccgccggagctgacgccacagaatattccttcccgcaccgccagttcgcgcatggtgttttccgcatcgcgctgatgaatatccagcacctcatccaccagagaagcgttgaaaatccccggcagatattccgtaggccagcggcgaatgccgggaatgctgctgccctcttccggttgcaggccgacaatggtcaccggtttggattgttcgcgcataaagcgactgacgccggtgatagtgccggtcgtccccatgctggagacaaaatgagtgatgcgcccgccggtttgctgccagatttccggcccagtggtggtgtaatgcgcataagggttatcgggattattgaactgatcgagcagctttccttcgccacgattcgccatctccagcgccagatcgcgcgcaccttccatgccctgctctttggtgacaagaatcagttccgcaccataagcacgcatcgccgcacggcgttcctggctcatgttgtcgggcatcagcaatttcatgcgatagcctttcagcgcggcaatcattgccagcgcaatgccggtgttaccactggtggcttcgattaagacatcacccggtttaatttccccgcgcttttccgcctcgacgatcatgctaagtgccgcacgatctttcacgctacctgccgggttattgccttccagttttaaccacacttcactgccgttatccggccccattcgctgcaacttcaccagaggcgtattgcctattgtttgttctaatgtactcacgatctctatccatacgtggtgttgcctgatgcgacgcttgcgcgtcttatcaggtctacaggttacaaaccttgccattaaaaagcccggatcgcgggaagcgcctccgggcgtttaacattcactcaacctatcaggcgctttgtgcgagagcaagttcctcatcgcgggtttcgatacgctcgtcgccgttatacagccgcgcatgttgcagaccaacgaataaacgctcgccacgctgcggggcatcgtcgccatgcatcacgaccgtcagcggttcgttgtaccaccccagcggctgcaccactaattgggtgtagtgacctttcgggctggcttccagtacctgtaccggcagcgggctatcgaggctggtacggcggctgatatccacttcccaagggcgcaggaagagatccaccggcccctgatacgcaggtgtgtagcccagcggccagcgatgcgcgccaacatggaactgcccgccgcgaatggttccctgcaggcggttcacttcgcccataaattcgagcacaaaacgggtcgccggttcgcgccatacctgatccggcgcgtcagcctgttcaatattgccctggctcatcacaactacacgatcagctacttcggtcgcttcttcctgatcgtgggtcacaaaaacgctggtgaattttagttcttcatggagttgacgcagccagcgacgcagctctttacgcacctgcgcatccagcgcgccaaacggttcatcaagcagcagaatttgcggttccacagccagcgcgcgcgccagcgccacgcgctgtttctggccgccggaaagctgcgccggataacgatccgccagatgggcaagctggaccatttccagcaattttgtcactttcgctttgatggctgcggcattcgggcgctcgcgacgcggcagcaccgtcaggccaaaagcgatattgtcgaacaccgtcatatggcggaacagcgcgtaatgctggaacacgaaaccgactttacgatcacgtgcgtgcaggcggctcacgtcggtgccgtggaagcgaatatgcccgctggtttgatgctccagcccggcgataatgcgcagcagcgtggttttcccggaaccggacggccccagcaacgcgaccatctgaccactaggaatatccagactgatatcgttcagcacctgggtgcgaccaaagctcttcttaatattggcaatctcaatgctcatgatgttcctcctgctgtgcgcgtttttcctgattctccaggcgccactgcaacatactttttaaaaacagggtgataatcgccatcagcgttaacagcgccgcagcggtaaaggagccgacggtgttgtagtcctgctccagcaattcaatctgtaacggcaggctcagggtttcgccgcgaatgctgccggaaaccacgctcaccgcgccaaactcgccaattgcgcgggcgttggtcaacaccacgccataaagcagcgcccagcggatgttcggtaatgtgacgcgacggaacatctgccagccggacgcgccaagcaaaatcgccgcttcgtcttcctggctgccctggcttaacatcaccggcaccagttcgcgcaccacaaacggacacgtcacgaagatggtgaccagcaccattcccggccaggagaacataatttgcaggttatgctcgtcgagccaaccgccgagcgggccgttagagccgtagaacagcaaatacaccagaccggcaaccaccgggcttacggcaaacggaatgtccagtagcgtcagcagtaactggcgtccagggaagttaaagcgcgtcaccagccaggccagcagaatgccgaacaccaggtttaccggtacggcaatcagcgcgatcatcaccgtcagccagatggcgtgcagcatgtccggatcggccagattctgtaaaaccggcatcagccccttgctgaatgcctgcacgaagatgtaaatcatcggcaccagcaggatgaacgcgctaaccagcatcccgatgccaatcagaaaccatttgccccagttaatcgggcgcgcgtcataacgcttcaattgggtaacttccgccattaatgacctaccacacgccgaccaaagcgactttgcagagtgttaatactgaacagcagcagcagagatgccgcgaggatcacgctagcaatcgcgctcgctgccgggtaatcaaactcctgtaagcgcacaaaaatcatcaggctcgtcacttccgtcttccacgcgatatttccggcgataaaaatcaccgcgccaaattcaccaagactacgggtaaagctcagcgccacgcccgccaccagcgccggagaaagctccggcagcaccactttgcagaaactctgccagcgcgttgcaccaagcgtttccgccgcttcttcatattccgggcctaactcttccagcaccggctgcacggtacgcaccacaaacggaatgctggtaaaggccatagccaccgcaatccccagccatgtataggtgactttgatatcaaacttcgccagccattcaccgtaaaaaccgtttacggaaaagaggctggccagcgttaaaccggcgacagccgttggcagcgcaaagggtaaatccatcagcgcatcaagcagcgtgcggcctgggaagcgatagcgggttaggatccacgccatcagcagaccgaaaacgccgttaaaaatgcttgccacaaacgcgctcagcagcgttactttgtaggccgcgaccacctgcgggttggtgatcacctcccagtactgcgcccagctcatctgggccagttgcatcaccagcgcggagagcggcagcagcaaaatcaggcacacaaacagcagactggtgccgaggcttaaggtaaagcccggcagcacgcgtctggaggagacagcaaacatcagttacgccccgccgctaacagcttgtctaactcgccgccgctggtgaagtgggttttcatcacttccggccaggagccaaatttgtcttccacgcggaacagctcggtctgcgggaatttgtctttcagtttgtccatcacctccgggttattcacgcggtagtaatagtcggtgatgatggtttgcgcctgcgggctatagagccagttcagataggctttggcggctttttccgtaccgttggcctgcacgtttttatcaacccacgccaccgggaattccgccagaatgttggttttcggaatcaccacttcaaagccctgcgcttcatactgtttacggatgttgttcacttcgctttcgaagctaatcagcacatcgcccaggccgcgctcggcaaaagtggtggtcgcgccacgaccgccagtatcgaacacttcaacgtttttcaggaactgggtcataaactgttcggttttgcctttgtcaccaccgtcagctttatccgctgcgccccatgccgccagataggtataacgcgcgttaccgctcgttttcgggttcgggaaaatcagcttcacgtcggagcgcaccaggtcgttccaatcgtggatattcttcgggttacccttacgcaccaggaagcccatggtggagtagaacgggctgctattattcggcaggcggctctgccagtcggccgggatcagcttgcctttatcgtgcaggatttgtacgtcggtcacctggttataagtgacaacgtcggcttttaagccctgtaaaatcgccagcgcctgtttactactcccggcatgagattgttttatcgtcagtttgtcgccgccgttatcttttgcccattgttgctcaaacggcggattcagggcggcaaacagctcgcgggagacgtcataagaactgttcagcagttccgttgcctgtacatggcccgccagcagcagagaagcgaccagcgcgagactgttctttttcagtaagttaacggccattgcgcacccttataaatttaatgactttctaatagccatcatatttataacggacgtgaaaggagtaacggttttatataccgtttggtgatttggaagttgaaaagggaataagaacttggttcaacaggcgtaattgttgcagtcagtttggacacgaacagcgcggagaaaccggagcgtacacatagtacgtgaggatttcgagcactgcccggggccaaaatgacaaataaaatagcctggtgaacttagttcaagacgaaatcctccccacaaatgcagggaggaaacagaggtgaatcagataccgacgctaaccgtctccggcagtgtgctgccgccatcaatcacattctgtgtaccggttaaatagctggattcatcgcttgcgaggaaggccgccagttcgccgacttccagcggatcggcgaggcgacgcatcgggattgctttcgccatttcagtcagcacgctctctggatcttccgggttgctctggcgggcaatgctttccgccattggtgtgcgcacgtatcccgggcaaatggcgttaacgcgaataccagactgcgcgtactccaccgccaggctttttgtcaggccaacaatcgccgctttcgttaaggcgtacgccgtttcgccaggatcggccaccatatcaccagtgacactagacatcatcacaatgcgaccatctttgcgggcaatcatctccggcagcaccgccttcgtgacgttccatacgcctttaatattgatgtcaatatggaaatcgcgatcgtcatcgctcatatcgaggaaactgcccagacgacaaacgcctgcgttattcaccaggatatcaatgcgcccttctttttccttcgcgcgtttgatagctgcggctacgctcgccgggtcacgcacatcggcgacaaccgccgtacagcgatgaccacgaccacacagttcgtccgccagcttttcgatctcaggggagatatccagcaagattaggttcgcgccatgacgtgcaaaagttctggcaattccttcgccaattccctgcaatgcgcccgtaatcagtgctgtcttgcccgtgagtttacccattttaatgctctccttgttaatacagagcgttacactccattccctctgaaaatacaggataaacaaaatattgctgcggatcagctcactaattcaggaaaatctcaatccagtcgctgctttatgcatcatttcaggcgttgtgttagctcactgctgcgctgaatcattttcaaactctccacatcattgagttgcacaaggccaacaaacagtaaatcggtaacagaattttgcgccgtgcgggtagacatgctgctgctacgccattcggtttctccggaaacggtatcgagggtgaaatgcgccagccgccgcagcggagagtcagtcagagaagtaatggcaatcaccgttgccccctgctttcgtgccgcttctgcgcacaagacaatctcttttttactgccgctgtaagagatagcgatttgtacatcgccttttttcaacgcctgagaaacggtggcttgtacgtgcgtgtcggcttcgcaggccacgcgatagccaattttcatcagtttgaagctcagatcgcgccccaccagcgcgcttccgcccaggcccgttatctggataaacggtgctttactgatgacctcaatgattttttgcagccgcgcgtaatcgagcaacgcgcaggtttgctccagcgccagctctttttcgcgattcagtttgcgcgcgatcacttccaggctatcatcactggtaatgctactgtgcaggtgcagtgccgtggcattcgttttctcccggctggcactgtattcgcctattaacgccatacgcaattcagtaaatccttgcgcgccgagtttttgggcaaatttcactatgctgctctggctaatgccgagctgtttcgccatctgccgactagaaacggattgcagctcactcacgttggcctgcagaaagtcagcgattttttgctcgttttcggtgaattcactccccgcattgcttattttcgtcaggtacaacatcttccactctcctgggctggcagcataaattccgcttaagttcttatgacgctcttcacactctgcgagtgtagactcaatgattcctttaagcctgtcaattcgggatatatgattccatacatctgcaattatttgatcgtaaatagtaaggtcaccaccgatgcaatttgaaaagatgattactgaaggcagcaacaccgccagcgctgaaattgaccgcgtaagcacgctggaaatgtgccggattatcaacgatgaagataaaaccgtaccgcttgccgttgagcgcgtactgccggatatcgccgcggcgatcgatgttatccacgcccaggtaagcggcggcgggcgtctgatttacctcggtgcgggaacatccggtcgtctggggattctggatgccagcgaatgtccgcccacctacggcgtgaaaccgggtctggtggttggtttgattgctggcggcgaatatgccattcagcacgcggtggaaggcgcggaagatagccgggaaggcggtgttaatgatctgaaaaatattaatttaacggcacaggatgtggtggttggcattgctgccagcggtcgcacgccgtatgtgattgccggactggaatacgcacgccagctcggctgccgcacagtgggaatttcctgtaatccggggagcgccgttagtaccaccgctgagtttgccattacaccgattgtaggtgccgaagttgttaccggttctagccggatgaaagcaggtacagcgcagaaactggtgctcaatatgctttccaccgggctgatgattaaatccggcaaagtgttcggcaacctgatggtcgatgtggtcgccaccaacgaaaaactgcatgtgcgacaggtcaatattgttaaaaacgccaccggatgtagcgcagagcaagcggaagcggcgttaattgcttgcgagcgcaactgtaaaacggccattgtgatggtgctgaaaaatctcgatgccgcagaagctaaaaaacgcctggatcaacacggcggctttattcgtcaggttttagacaaggaataacccatggccaaagagatcagcagtgaacttctgaacaccattcttacccgtgtcggcggaccgggaaatatcgccagttgtggtaactgtatgacgcgcctgcgtctgggtgtacatgacagtagtctggttgatcccaatatcaaaacgctggaaggcgtgaagggcgtcattttgaccagcgaccaggtgcaggtcgtttttgggcctggtaaagcgcatcgtgccgcaaaagcgatgagcgagctgctgggagaagcaccggtacaggatgccgcagaaatcgccgcccagaacaaacgtcagttaaaagccaaacaaacctccggcgtgcaacaatttctcgccaaattcgccaccatcttcacgccgctgatccccggttttattgccgccggtctgctgctggggatagcgacgttaattgccacggtgatgcacgttccggcagatgctcagggaacactacccgatgcgctgaattttatgaaggtgttcagcaaaggtttgttcactttcctggtgattctggtgggctataacgccgcccaggcatttggcggcacgggcgtaaatggcgcaattatcgccgcgctctttttgctcggttataaccccgcagcgaccaccggttactacgccggttttcacgatttctttggtctgcccatcgatccgcgcggcaatattatcggcgtgctgattgccgcgtgggcctgcgcccgcattgaaggcatggtgcgccgctttatgccggacgatctcgacatgctgctgaccagcttaatcaccctgctgatcaccgctacgcttgcgtacctgatcattatgccgctgggtggctggttattcgaaggtatgagttggctgtttatgcacctgaacagtaatccgttcggttgtgcggttttagccgggctgttcctgatcgccgtggtatttggcgtgcatcagggctttattcctgtttacctcgcgttaatggacagccagggattcaacagcttatttcccatccttagtatggcaggcgcgggccaggtgggcgcggcgctggcactctactggcgggcgcaaccgcacagtgcgctacgcagtcaggtacgcggggcgattattcccggcctgctgggcgttggtgaaccgctgatttacggtgtcaccctgccccgcatgaagccgtttgttaccgcctgtttaggcggcgcggcgggcggtttgtttatcggcctgatagcctggtggggtctgccgatgggcttaaacagcgcctttgggccgtctggtctggtagcgctgccgctgatgacttccgcacaaggcatccttccggccatggcggtttatgctggcgggattctggtggcatgggtttgcgggtttattttcaccacgctctttggctgccgtaacgtcaatctggactgatatcatgaaacggacaatgctctatctttctctgctggctgttagttgtagcgtcagcgccgcaaaataccctgttctgacagaaagcagcccagagaaagcagggtttaacgtcgaacggcttaaccagatggatcgctggattagccagcaagttgatgtcggttatcccagcgtaaacctgctgatcattaaagataatcagattgtgtatcgcaaagcctggggagcggcgaaaaagtacgatggcagcgtgttgatggaacagcctgtcaaagccaccaccgggacgctgtatgacctggccagtaacaccaaaatgtacgccacgaacttcgccctgcaaaagctgatgagcgaaggcaaactgcatcctgacgatcggattgcgaaatatattccggggtttgccgatagtccaaatgacaccattaaaggcaaaaacaccctgcggatttctgacctgctgcatcacagcggcggtttcccggcagatccgcaatacccgaataaagcggtcgcgggcgcgttatattcccaggataaaggccagacgctggagatgatcaagcgcacgccgctggaatatcagcccggcagcaaacatatctacagcgatgtcgattatatgctgcttggatttatcgtcgagagcgttaccggtcagccgcttgaccgctatgttgaagagagcatttatcgcccgctcggcctgacacatacggtatttaacccgctgctgaaaggctttaaaccgcaacaaattgccgccacggaattgaacggcaatacccgcgatggcgtgatccatttcccgaatatccgcacctccactctctggggtcaggtgcacgatgaaaaagccttttatagcatgggcggcgtttccgggcacgcaggtttgttttccaataccggcgatattgcggtgttaatgcaaacgatgctgaacggcgggggctatggtgatgtgcagctgttcaatgcggaaacggtgaagatgttcaccaccagctctaaggaagatgccacttttggcctcggctggcgcgtgaatggtaatgccaccatgacgccgacgtttggcacgctggcaagcccgcaaacctacggtcacactggctggaccggaacggtgaccgttatcgatccggtgaatcatatgacgattgtgatgttaagcaacaagccacatagcccggttgccgatccgcaaaagaatcccaatatgttcgaaagcggtcagttgccgattgcaacttatggttgggtagttgatcaggtgtatgcggcgttaaagcagaagtaataaaaaggccagtcagtaatgttactggctggtctgagagtgctgacaaacgcaaaactgcctgatgcgctacgcttatcaggcctacgtggagcccacaatatattgaattagcacgatttcgtaggccggataaggcgttcacgccgcatccggcgtgtacaacgcgcacttggtcaacaatctgaggccagtcagtaatgttactgcctggcctttaatcaatgaatcagaaacgcttacagcgccatcaacttgtccaggctcggtgcgaaataatagccgccggttaccggtttggtgaaacgcaacatcgcatcacgcttaccatcggtatcgccaaacatgctcagcagttgctgctcaatgttatgcagacgcgcgcagtaggcgcagaagtacagaccgtgagtgccactggcagtgccgtacggcaggctctggcgaacaatcttcagccctttgccatcttctttcagatcaacgcgggtgaggtgagaggtttccggacgttcgtcgccgtcgatctcttcgttggcctctttggtgcgcccgatcaccatctcctgatcgtgaacgctcatccggttgagctgcttcaggttgtgttcccaacgctggacaaacacatagctgccgcccgcatccacgccgtctttgataaccgccacttcgcgacgcgtctcttcacccgccgggttttccgtaccgtcaacaaagccgctcaggtcacgctcttcaacccaacggaagccgtggatctcttctttcacttcaatgcagtcaccaaaggcttccatcgccgcctgggcgacagagaagtttacgtcgtgacgcagagaaagaatgtggatcaacacatcgaactgggtcgtcggcgcaaggcctttaccgtagcccggaaaatctttcagctcttctgccccaacgccgccgctcagagcgcgccaggtgttgttaccaaaggcaaccaccgcaccaagatgcgcgtccgggaatttcgcttcaaaagttgccagtttgtcggcaaatgttttactggccgcacgcagggcgtcaacttcccctttcacgttggcttcgatccaaatcgccgcgcggcaatgttctggcaaaatgccactctgaacctgagacattgttcctcctgaaaataataatgccacgcaatccgtggcattgttgagcgctattttacgtgttttttcgcggcggcggtttgttcagacgcaaattaacgccgccagataattttactgactttccagtttttcagggtatcgtcgctaggcattaacccttcaggaccacgccattccccgctgaactggtagctaatatgttgactgccttcggctttacattcgacggcacgattatcatcaccatcagctttttggcaattgccaaatgctttgctgtaaaggtcgctaaacggtgtaccgattttaacaccggtgtcagcaggaatatcgctatccagcacgtcaatgcgactgatcgtgccttgatcgccgttaatcaccatcgccacgttgtcgcccttcatcacttcaaaaaagcgcaccacgttgccgttcgcggttttcattccgctgcgcaggcgataatcgccatcaagcgcatcggcaatggcttgttcttgcagtggtgtggacgccgttaattcacccacgccctgctcgctcactttggtggagctcccaaaccagttccacgggttagcggcagaccagttaacactgctcatcgtggaacagccggtcagcatcaatggcatagcgcataacattaaacgcaggcttttcatgtcacttcctttggttattcaataacgttgcttggagtgcaaattcaccaaaaagtgccgttattcttttacttcataaaaacaagcgcgtaaacgtcgattggtcagcagccagattaacgccacaatatccgccactaccagcgccagaccgataccgctaacggattcaccgttcagccacagccacggttgccagcaaagtaaaaccacctgcgccaacagcaacagaaaatagagtacacgccaggtgcgaggaaacgtagcccgccgaccgctcaacaaaaacgccagcaccgccggaatgccaggaatcagccccagccagaaattatcgtgatcgggataaaacagatttagcagcgcagtaccctgctcgcggctcgcaccggcaatgacaaacagcacccaggttcgcgcctgaagcaatagcacaagccagaagagcaagggtaaacgcaggcgaccgtgcgcatcataatggacaggatgaaactcagtactcttcatcttcaatcaaacgcttacccagactcagcacgtcggcgtgttcatatcccaggcgttcatacattccgagcaccatgtcgttatcttccggcacattgatctgaattttcgggcagccacgagcaatcagctttttctccagccgattaagcaacgcattggcaatcccacgcccacgaaactctggatgcacgccaagataataagcagacccgcgatgcccgtcataaccgcccatcaccgttccgaccacgtcaccgtttacctcagcgaccaaaaacaaactgacgtcatggttcatcttacgctcgatgtccatttccggatcgttccacggacgcagcaagtcgcaacgctcccaaagggtgatgacctcttcgaaatcttcctggcgaaatacgcgtatctccatggtattcgttacctttttgcgggttaaaaggctgattatggcgtgaacggtcgaattagccaatatctgacgaaaatcggttgaaaaagtggcataatggggagttgtcaactattgaaatgaaaagtaaaacaattctcaacagcaaaccgtcgtaacggattacgcgatacgatataacatctggaactttattattacaactcaggccgtatgagcacttttaaaccactaaaaacactcactagccgccgccaggtgctgaaagccggtttggctgccctgacgttgagtggaatgagccaagccatcgccaaagacgaacttttaaaaaccagcaacggacacagcaagccgaaagccaaaaaatctggcggcaaacgtgtcgttgttctcgatccaggtcacggcggaattgataccggagcgatcggacgcaacggtagcaaagaaaaacatgtggtgctggcgattgctaaaaacgtccgttccattttgcgtaatcatgggattgatgcgcgtttaacgcgttctggcgatacgtttatcccactttacgatcgcgttgaaatcgcccataaacatggcgcagatctgtttatgagtattcatgccgatggctttaccaacccgaaagctgccggtgctagcgtatttgccctctctaaccgtggggcaagtagcgcaatggcgaaatacctgtctgaacgcgaaaaccgcgccgatgaagttgccggtaaaaaggcgactgacaaggatcacctattgcaacaagtgctgtttgatctggtgcaaacagataccattaaaaatagtctgacgctcggcagccatattctgaagaagattaagccggtgcataaactgcacagccgcaacaccgaacaagcggcatttgtggtgttgaaaagtccgagcgttcctagcgtgctggtggaaaccagctttatcaccaacccggaagaagaacggctgttaggcacggcggcgtttcgtcagaaaatcgccacagcgattgctgaaggcgtgatcagttatttccactggttcgacaaccagaaagcacatagcaaaaagcgataagttatgaaacccgacgcacaccaggttaaacagtttctgctcaaccttcaggatacgatttgtcagcagctgaccgccgtcgatggcgcagaatttgtcgaagatagttggcagcgcgaagctggcggcggcgggcgtagtcgggtgttgcgtaatggtggtgttttcgaacaggcaggcgtcaactttagccatgtccacggtgaggcgatgcctgcttccgccaccgctcatcgcccggaacttgccgggcgcagtttcgaggcgatgggcgttagtctggtagtgcatccgcataacccgtatgttcccaccagccacgcgaatgtgcggttttttattgccgaaaaaccgggtgccgatcccgtctggtggtttggcggtggcttcgacttaaccccattctatggttttgaagaagatgctattcactggcatcgcaccgcccgtgacctgtgcctgccatttggcgaagacgtttatccccgttacaaaaagtggtgcgacgaatacttctacctcaaacatcgcaacgaacagcgcggtattggcgggctgttctttgatgacctgaacacgccagatttcgaccgctgttttgcctttatgcaggcggtaggcaaaggctacaccgacgcttatttaccaattgtcgagcgacggaaagcgatggcctacggcgagcgcgagcgcaatttccagttatatcgtcgcggtcgttatgtcgagttcaatctggtctgggatcgcggcacgctgtttggcctgcaaactggcgggcgcaccgagtctatcctgatgagtatgccgccactggtacgctgggaatatgattatcagccaaaagatggcagcccagaagcggcgttaagtgagtttattaaggtcagggattgggtgtaactccctcacccccactcccgcatccgctgatgcagcgtcagactcggcttctcggaaaacagctgctggtaatccgtggcaaattgccccagatgccagaatccccactgcatggcggcgtcttttaccgtcatactttggctccacggacttatcagttcgcggcgtacggcgttcaggcgaatgcgtttcagccacgcgttcgggccaatgcctaaaatagcgtgaaacgcgttttgtagcgtgcggcggctgacatgcagttgattacacaaatccagcaccgtcaccggttcggacatgttttccagcacatattcacgggcgcgggaaagcaatcgacggtaactctgatgactgatgctttccgccgtcaccattggttgcgcttcttccagcatggcccccatcgccattagcaaattatcccccagcacttttcgcactgcaggctgatggagattttccggattctcgcaaaacgtcgccagcgcctgttggacaaagccccacagcgcggctttatgctgctctttcacttccagcgcgctctggttacgcaacatatgtaatacccgatccgggttatgcaaaaagttagcctgccgggtgatgacatcttcagaaagcaccacgcccaggatcgtgtaatcatccggcgtgctcagttcaaattcagtgccaccagggcgggtggcgatttccgcgcttcccagacattggctaccgataaatccctgctcaccgcgcgtcgccggaatgccaaaccagaagctgttcggccagaccaggcagctctgacgcagcgccagaccggtgtattcacgaaaaacctgaatatcatcgagtagaatttccgtaaattcaccatgaaacttgcccggatgcagctgatcgtaaatctgctgccaggcggtaatcgttaaagcatgttcatagacatccgttgtctgtcgttgatgaacattatccacttcgaccttcggcgtgagcttcaggttttcgggtaagggttcatgataaagatggtgcaaattggctgtacgggtctttttcatgatgttaatgccgggtgttgtaggacacccggcacctccgacaggttaatggggcttgagacgataacgactactgcgtttacgtaacgtcccggcagaaaagagctgttcgagcgcatttctggctttttccagcggccagccaaagtgggcagccacttctcctgccgtcattccctgacgtacacttgttaacagcgccaacaactcgtcagcagattccgcgacgataactggcgcgtcgggttcccttacgggttgcttcggctggcggttaaagccagtaaccagccactgggtgtcatcgtctggccgaccgatctccttgcggctgatgacacgcccggtacgcatcgcggcagcacaacctgcgtccagcgccgcacgacacgccgccagatcgccttccaccaccagcgttaagcgaccagggtcaagcacttcgtgactgagcagacgaacgttagctgctttgagcatggcatccgctgcatctatcgcggcgaccatgccgtccacttccagcaatcccagtgcattgatcatcggcaacctccgttacgcacgctggattggattacgcgcgatttccagcactgcatcggtaaaggcgttacaggctgctttacacgctgcctggctaccggttaaaaatgctgcgctgtagttggtttcagacggtggcgggacataggtcgccagctgtacgtcggcagacttcagggctgcatcaatgccataggtcgcttccagcggcggtgccaccagatacgccatcggatcgccaagcgtgatcccggcggtactactgagataagaaccggtacggctaactacatgtgccaggaatgccgtatcttgcgcgtcattagcccactggaaagctgcgccattttcaatatgcgcaatcatcgcatccagacctgcacgcacttccgccgggtttggcccaccaagcataatcagcacttcaccggcagtcggactcgggccgtgtgcagcgcccgcatataggctgcggccatacaccacttccaccatcgcctgcttggtcgcttcatcagcggcaatgtaggtgacgtcatcggagtcggcagaaatcagaccgaggctacgaatatgcggcggcaatttcagttcacgcgcaaaatcggcgttaacggaggcaatcacccgcatagcggtgacagacggtcgaatcaaatctaaagctggcatgatgcctccttatcgggtcatgttgatgccggatgctttctgctccagcatacgtttcgccaaatccacaatgacggctgcggcttcaaccggcggcgtgccgccctggtgaatgttagagatacaggtgcgatcggcctcaacggtggtcgccatacgcgggctgtaaacggcgtagcaggagaggctttcactctgacccaaccccggacgttcgcccaccagcaggatcactactttcgcgccgaggatctcaccgatctgatcttcaatcttcacgcgaccataacgaacaaagaatggtgtaccgactttcagcccggcctgtttcaggcccgccatcagcggtggcaggatctcttcgtagttcacggtgatcgcatcagtactcaggccatcagaaataacgacctgtacgtccggattggcaacacactgcgctttcagcgcttcaacagcttctgcacacaggcggcggcccatatccgggcgagtcaggtagagatttttgtcgctaatttcagagcgtacttccagcaagccctgcgctttcacccactcttccggcacttctttcagtacggtatctttgctacgagagtgatcggccaggaaacgcagcagcgcctgcgtacgtggacgcggaccggcacgaccggtacaaacgcgggccacggtgctgcggcgcagttctgttaatacgtctgcgcgatgcggattttcaacaccaatccacgcttttgcttcagcggaacctaaatccagcgcacagctttcgctggtcaccggtgccgcacagttggtggtggcgcactttgcttcactcggcgcgggggccgcttgtcccatactcgccatcacgctgcgtacaatttcttcaatctgtttttgatccatgatatgttatctccgcgtcatcagaagaacagactcggatcgcccgcccgtttggtcaggcgaccgtttgccataatgcccatgctttccagccagcgttcaaactccggactcgggcgcaggttgagtaactgacgcacagtggcggtatcgtggaatgcggtggtctggtagttgagcatgatgtcatcacccagcggcatccccatgatgtagttgcagcctgcggtggcgagcaggatcatcaggttttcgttgaggttctggtcagcgtcagcgtggttggtataacagcagtcacagcccatagagatgccgctcagcttgcccataaagtgatcttctaagccagcacggataatctggcggtcgttgtagagatactccggcccaataaagccgaccacggtgttgacgataaacggatcgtaatgacgcgccagcccgtagttacgtgcttccatcgttacctggtctgcgccgaagttagcgccagcggatagcgcagagccttgtccggtttcgaagtagaggcagttttccccggcgatacggttgaactccgcgcccactgcgcgcgcttcgtcgagcatcgccagctccacgccaaactctttcagccctttttcgctgccacagatactctggaaaatcagcccgcccggtgcgccacgacggatcgcttcgatctgggtggtgacgtgcgccagtacacagccctgagttgggatgttgaatttgtcgatcacgccatagatggtatccaacacgcggcttaagttttccacgtcgtcagtcaccgggttaacgccgatcaccgcatcgcccaccccgaaggaaagcccttcgtagatttgcgcggcgatactttgcacgtcgtcacgggtgtcatttggctgcaaacgggcgctaaaggtgcccggaataccgatggtggtattggcctttttgattaccggcattttcttcgcgccgtagatcaggtccgcgttggagcaaatcttcgctaccgccgcgaccacttcgctggtcagccctttgcgggtaaaggcaatgtcgtccacgctggtttcatcgctcagcacatactcacgcagttcgctgatgctccagtttttaatctggttgtaggccgtttcgttaacatcgtcctgaatcagccgcgtcacgcagtcatcttcataggcaatcaccggattattgcggatgtccgctacggtcatttcgctcaacacctgctttgccgccacgcgctcctgactgcttgccgctgcgacgcccgccagcacatccccgctacgcagttcgttggctttagccagcacctcttttacatccttaaactgatatacattgccgaacaatgtggtctttagtttcataagtcgttccctcaggaaggaaatgcgagacttttcaccgtcaccggcacaacgcttccgccaaaaagaggcgtaccaatgtcgatatagtcccccgcgcggacaatcacttcgtcaatgactgccaacgggagttgttgtagctgtgggcgcaacaacatgcccagagctttaccaaagtcctgcccggccaccaccagcaggggatgcggattcggaaaacgcgcgacgaaatcgaccaacgcgttgatgaccgtcagtaccgcggcgtaacgcacaggcaggctggcgggaagcgccagcacgtacgcgtcagttttgggatcaagatccagctgaatcagcgcctgttgccaggcccccaccagatccgtttcatcaatcgggatcgccaccggcaaattgcgcagcggcagttgtacgccctcaagccagattgtgctgccagagaggctaagggtatgcgcgcccgcgccaatcaccgtggcgcgcacggtttgcgccggaaactgtacgttcatctcacgcaggcgcggatggtcatgcagcgcagttgccagcagcgggccaatatcggcaaaacagaacgggtcggcgggctggtggcgataacattcgcccacgccgccagaaagcgtaatgatttcgggcgtaacacctgcgggcagcaaaccggtttgcatcaatgcctgcgcgagcggactgagcgttccgtcaatcacttcgacaatcagttctgccatccgccgggtcacctgcaccagctgcgcgccggtcaggctacgggcgtcggtgcctgcaccgaagcactcatccacaatcatctgccccggtttatgagcgtaaaccacgcgcccgtggctgtcggtttccagcaggcgaccaccgacgttgaggcaggcagtgccgctgatttttccggcatcgaacagggcgtagttcgcggtgccaccgccgatgtcgatattcagtacccgacacagccgttgttcagaaagggtttgtgccccggctccgtgaccggcgatcacggattcgaggtgcggcccggcgctggcaacgacaaaatcgcccaggctctgagagagcgccatcaccgccgggcgagcattgcgggttttcgcgctttcaccggtgatgatgatggcaccagaatcaacgctttccggctcaatacccgcagcatgatattgctcgagtattaaggttttcagttccgcttcttttaaaccgccctgtttatcgacaggggtaaagaacaccggactttgccagctaatttcgcgtttaatgaattcgtagcgcggcacctggctcaccgccgcacggttaaccagctccagccgggagaaaatcacctgggtggtggtggtgccgatatcgataccgacgctcaatagctggcgagtgttcacgattgtgcctccgcttcggtttaagtcagctttgtgcctccgcttcggttttagtcgcggtcgcgtcttcttttggcaccagcatcatcgccacgccaatcgccgttacgccgccgatcaacttgccgacaatcatcgggaagatcatggcgttcatgttggcagcggcgaagcctaagtggtcgcccagggcgaaagcagcggaaacggcgaaggcgcagttgatgactttgccgcgggtatccatctgcttcatcatgccgaacatcgggatgttgttggcaagcgttgccaccatgccggctgccgcgatgttgttcatattcagtactttaccgacgctcatcagcggtttttcaaaccagcgagtcagcagcagcaccatcggatacgcccctaacagaacgcaggagatagaaccgataacttcaatggcgcgcatcacctcaccgggtttatcgccaggggccataaagataggatccagaccggggatcagttcccagccaagcaggaatttcactaccgcagcggcaagaccgagggtgatcaatgcaacgaggaatttggcgaagatctggaagccgttgatcattttttccgggatgaatttcagccccagcgccaccagaatcgcaacaatgatcaccgggatcatgttcatcaggatcagggcgaaagtgaattccaccggctggccgttgatctgcacaccggagtacatagcaaccagaccaccagcgatacaaccaatcggaatggtcacaatgcccgccagcacgccgagcgccagataacgacggtcagaaggttcgataatgccgagcgccaccggaatggaaaacacaatcgttggccccatcatgctcccgagaattaacccagagtatagccacgcggctacgtcgccgcccgccagctctttggcgaggaagaagccgcccatatcgcacgccagcagtgttccggcgaacatgcttgggttagcgccgagcatttcgtaaaccggaataattaccggcccgagaacgtgagccagtaccggtgccagcgcggtcataccgaccatcgccaggcccagtgcgcccattgccataaagccttcttcgaactgaccgccacttccttcgatacttttaccgaacttaccgaggaaacgagcagaaccgccgaactggctcaggatcctgtctacggcagctatcagcataaagaacatcatgatgtacatgatgatttcgttaattcccatcgcctttactccctgttagttgttatttattggcggatgcggcgtaaacgccttatccgccctacatgtgcaatcccgtaggctggataagacgcggcaagcgtcgcatccggcaattgcaccgcgccactggcggatgcggcgtgaacgccttatccgccctacatgtgcaatcccgtaggctggataagatgcggcaagcgtcgcatccggcatttattgcgccgctgcgtacaggccgacaatctgctccaggctggcggtacgcgggttactgcgcagacaaatatcttccagcgcggcctgcgcccatgcgccgtaatgcgcagatgtcgcaccaacatcgcccagtcgtttaccaatcccaacttccgcaatcagctcacttaccgcgttaatagcgtcacgatcgtcggattttttagttcgcagtgcccgaccaatctgactaaagcgttcacgacaaaccatccggttaaattccatcaccgttggcagcaacatggcgttcgcgagaccgtgcggaatatgcagcgccgcgcccggctgatgcgccatcgcgtggcacaacccaagacccgcactggaaaacgccattcccgccatacaactagccagcaacatgctctcgcgcgcggcaaggtcgtgaccgtagcccaccgctttcggcaggcttttgccaatcatcgcaatggcaccaatcgccagactgtcggtaaacggtgtagcgttcagggcgctgtatgcttcaatggcatgggttaacgcatcaatgccggtcatcgccgtgacatggctcggcacaccttcggtcaatgcggcgtcgaggatcgccacatccggcatcaggctggcatgggctaacacctgcttgcgcccgctcaccgcgtcgataatcaccgttacattggtggtttcagagccggttccggcggtagttggaatggcaatcagcggcaagcgcggttgcagaacgctggtttcactcatctctgccagcgtgctatccgggttcgtcaccagcaacgtcacggctttcgccgcatccagcacgctgccgccgccaaacgcgatcaccccatcacagccactctcacgcaactgcgccacggctgcacacacgtcggtaatgcacggttcgcccaccggacatggccagagcgtcatggcgatacctttaacggtcaggctacgcgtcagcccggcggtcatccctgcctgatgcaaaaagctgtctgccatcacgaacagatgtttcagcccacgcgtttgcgcttgctgtccgcaactgctcacgctgcccggaccgcaaagcgtcaccggtggaacgctaaatgtttttacccgttgcagattcagggtatcgaacgcctgaaagagcgcggtctgcaattcattttgcatatagcccctccgctttctctcgcccactactggcgatcgccagcggggtcataaacaaactgtgctgcggtaaatgcacctgtaacgccgggaattgtttgcgaaacagttccgccacgcccggttgcatacaagagccgcccgccagccataaatcagtaatgccctgcccttcaatatgccgggcgacaatgtccgccattttttcgtacaccggtttcaccgcaggccaaatctcttcaccgtgaccgcgcttgtactgctccgcctcttccaggctaatacggcgatttccggcgagagtcagagagatgtgatgtccgccggtggcttcatccgcgctgtacgtcaccttgccctttttcacgatggcaatgccggtagtgccgccgccgatatccactacaccggcgttgtccagttgcagcagatccgcaactgcggttggctcatccagcacatggctcacttccagtccggcagattccagcacgttgatggaaatacgcgggtccgtacctggaggaaaactagtcgccgcatggctaaaacgacgaccgaattgctgctcgagcgtgtcgagatggcgacgaacaatggtgacagcgccgaagaaatcccagacgatgccgtcgcgaaccacatcggcccagtcgaggcataccgccactggctgaccgtcgcggtcgacaaccatgctcaccacatcgcaggtgcccagatccacccccagccacagcggagattccgtcgcggcgggcgtctggttacacagcgttgccgccgtttgcagacgtggggtgagccattgttcgtcgtgcgccatctgttactccttaaacaatgcgaaacgcatcgactaatacacagcgacgcagacggacaaacgtacgcgcgctggttaccccttcaccggttggcgtggtgatggtcatggtggtccagccttccccgcccagccccagcccggcaatgcacggtccgttcttaacgaaaatgctggtatcaatagcattcgccatctggttcatgttttcgatgttgcggctgtgcattgccgccgtgtggtggcaaccgccttccagtttcaccgctagcgcaatggcatccgccacgttggcgacgcgcacgacgggcaacaccggcatcatcagttcagtcacggcaaacggatgttctgcggtggtttccacaaacagcaggcgcgtttcttgcggaactttaaggccgattgccgccgcgattttgcctgcgtcgcgaccaacccagtcacggctgacggtgccttttccgcgctcgtcgatatttttcagcaacaccggttgcagctgctgcgcctgttctgcggtcagtttcaccgcgtgctggccttccatcagacgcatcagttcatcggctacgctatcaacaacaatcagtaccttttcgtcggcacaaatgatgttgttatcgaaagaagcgcctttgacgatggactgagcggcacgggcgaggtcggcggtttcatccaccactaccggcgggttgccagcgcctgcggcaatcagacgtttattggtgtgtttacgcgccgcttctactaccgcttcgccgccggttaccaccagcaggccgatacccggaaacttgaacaagcgttgcgcggtttcgatatccggatttgccacagtaaccagtaagttttccggcccacctgcggcaacaatcgcctggttgagcagcgtaatcgcccgctgggagacttttttcgccgccggatgcggggcaaaaatgacgctgttgcccgcggcaatcaggctgatggcgttgttaattacggttgccgccgggttagtggaaggcgtcacgctagccaccacgccccagggtgcgttttcaattagggtcaggccgttgtcgccagtcagcacttgcggagagaggcactcaacgcctggtgtgccgcgcgcctgagcgacgttttttgcaaatttatcttcaacgcgccccatgccggtttcactgacggcaagttccgctaaatctctggcgtgtttttcgcctgcttcacgaatggcagcaatggctaactggcgcattgccacgctttttaacccttgctgggcgactttggctgccgcaacggcgtcatccagggacgcgaaaacgcccatctcatgaacggcggcggacggcgtgtcactgctttgcattttcagcagtaccgctttcaccacctgttcaatatcctgttgattcatgatgttctgccttatttgtggaaaattacctgaccgccagacaccacctcatcgacaatgccaatcacgcacagatcgaccggactcgtttcgcttttatgcgcctggcgggcggaactgccactcaccagtaacacccactccccggttcccgcgccaatattgtcgatggcgacggcgcattgcccgtcaggattaccttgtggatcaatcatttccaccatcagcaatttgtcatgcgccagtccgtgatggcgtacggtacaaacaatttgtccagtgacgactgccagtttcatacccgcctccgtggcgtatttcaggtaaaagctccccctaccctccgcagaaggtaaaatgaaaaaggagagagcgtgacgcccgaatcgacgtcacacagggtgattacaggttgctgctatcgcctttcaggccgatcgggaagacttcttccaggtcgccgtgcggacgcgggataacgtgtacagataccagctcgccgatacgctgtgccgctgcggcacctgcatcggtcgcggctttacaggctgcaacatcaccacgaaccatggcagtacacaggccgccgccaatctgcttaacaccaaccagcttgacgcgcgcagctttcaccatcgcgtcagaagcctcaatcagtgcaaccaggccccgggtttcgatcattcctaatgcttccattgtgctttcctctttatcagggtccagaacgggaccgttcattcaaccagtgtttgtaaactgctttcgcggttcacttctgtctgacgcggcacagctgccaccagcgccagctcgataatttcctgcacgctacaaccacgagagagatcgtgcatcggcgcggcaagtccttgtatcagtggcccgacggcacgatatccgccgagtcgttgtgcgattttgtaaccaatatttccggcttccaggctcggaaaaaccatcacattggccttgccctgtagcgggctggcaggcgctttttgcgccgccacttccggcacgaaggcggcgtcaaactgtaactcgccatccaccaccagctttggtgcgcgctcacggacgatttctgtcgcctgctggacgttagcaacacaggggtgacgggcgctaccattgctggaaaagctcagcatcgccacgcgcggctcttctccggtgatggcgcgccaggtttcggcactggcaagcgcgatatccgccagctgcgccgccgtcggctgtggcaccacgctgcaatcggcaaagcccaacgccgggccgctgtactgtggcaacatcaggaaaatggaagagagcgttttacagcctggctgcaagccgataatgcgtaatccggcacgcagcacatttgccgtggaagagaggttgcccgcgatacagacatccgctttaccggcgctgaccattgctgcggcgaacatcagagggtcggtaagtttttccagcgcatccggcggcgttttttcgcccgcgcgggccagccagcgatgagcaaattcttcccgcattgcgaggttgccatgcggatcaatcacctgtagcccgtccatcgccacgccgtgactgagcgcaaactgacgaagttcaaacggattggcgaccagaatgggcgttgccagaccttgttgatgtaaatattgcgcggctttcagcacacgttggtctaacgcatccggaaaaaccactctggcgggcgctcgcaacgccagttcacgacaacgttcaataatcattgcgtttcccccagtcgttgttggatctgcttcaccgttagcggctgcttcgttacgctcaggatcatcatcacgtagaccgtgctgctaaggcggttcagcgcctgcaaaatgtccgggcgtaatacttcaaagctgcgggtgataaagacctgcgccgctacggtttcggtttcccgcactttggtgcgtagcagattgagcaacgcagcatcgcgcccgtggctggcttccggcaccagatgatcgtggtcgagatagcgcagcggctgatgagaaagccgatgcagatcttcgtcagaaagcccgacaatcgcctggcagcccagcggttcccccagcgcatcggcgcgcataatgttgccaagacggctacggatatccgccagccacggctgccacggttccgccagttcaatttgcagccacactgccagcgcaatggtgctgtcgagaaccgcgcgaaaacccagacgcggatcgcttttggcgaccattttttccgcgctcaggtgagtcagcgtatccggcttttttgccaccggctggcgacacagttcgcagcacgcctgcggatgttcatcgctactggtcagcccatgaacgggctgcggctgctgctgttcatcgtcaacaaacaggcggccctgctcgtcaataaacttgatgcgcagatggcggctttccagcaactcccgggcagagggcgtcaggcgactgtccgcagggagatggatctctgcgccttcgctgagcgtatggttcgctcttagccatgcttcggtgatgaaatctttcatagggattgccagttagccggccaggcgacatacaggaatttcacgctggatgtcgtaccaaattcgatgctggagcctttcgggataaacatcacgtcgcctgctttggcgatcatggtttggccttcgtggcgaacatgcagctccccttccagcaccatgtcgatttcgtcgtagttcagggtccacgggaagaatgcgttctcccactgcataaaaccggcggccatgctgctgccgtcgtctccggtcacaagatcagtcaagcccacgcaatgcggctctgcgccgtcgaaacgaccaaacttgacgctactgccatcaatcactttgatgccgcctttgccggtcacgcttttgaagctcggctgcattgcgccctgctccaggctctgtttttccttcatcactttttccatcagctgtgcgaccaggctttcggtaaactggccttccggcagctgggcaatgatggtttcgcggatgcgctggctttcggttttgtcggctggcacgctggcgggcacggacgccgttaccgggatgctttcatcacattcggtgatggtaaaacccagtagatccgccacttcacgggcttccggggtaataatgctggcgcgcagaaccacggacattgcctgttcgccgcgcgcgtgtgcttcacgaatatcattcgctgtgatgagttttttcacctgcttcctcctgtttggtgagagatgccagataatccaccagttgctgcacgctttgcgggtcgtggctgtttagctcgaacatcggctcttcgaaacccgtctcaagcaataactttcgcgttgcggcgacgtcagcatctggcatgtccgttttactgatgacggcgatttgccgtttgctgacgccaatatccagcaacccggcaggcaaccgactttccgggtcatttgcgccatggacatagatcagcatgtctacatcctgtagcgtggtaattaaggcgtgataccagcggggatggttaaaatattcacccggcgtatcaatatcgcccttatcattaaattccacggcctgtgtttttctggcgagggtataattcccctgcaacgcattaaataacgttgtttttcctgccccgacgctacccacaaacgcaattcgtttcatgaatgcctcgtattaacttttggtcatttcacaaagcgtataatttaataagcgacctaaaccgctgacggtttgacttaacgcttcttctactgcgcccacgctgccataaatcaccaatgcaccgctgaatcggtcgagaaaaccgatatgcacatcagcggctttcagcgctaaatcaccggcgatcatcgccgtttcgccgggagttagcgtcataatgccaattgcgcccgcatccggaacgccgattttcttcgccagttcctcaccgggatgcgcgatgagatgcgccagtgtgacctgtttgccgggcacaaattcctgaatgatgcgttctttatccatgagtcgccgcctgtgaaaaactttcgtgtatcgtgacaatttttcgtcagagtaaataacaaaattcggcaagcgcgtttaaaaggtgaggtagatcactaagaatggagagatattcgctgtggtgcataaactttcatatgcaacgcatgaatataaataaaataatatcgagatattatatagactgcttttttttattattcgcaaactcagtaataagctttactaatatattgcagctaaactgcttaccctgaatattcagggtaagcgtgagagttaaaaaaaattacagcggttgggtttgcgcttctaccacggccagcgccaccatgttgacgatacgacgcacgcttgcgatcggcgttaacacgtgaaccggtttcgccacacccatcagcaccgggccgacagtcacaccttcgctgctggaaacacgcagtaagttgtaactaatgcgggcagcttccatgttcggcatcaccagaatattggcggaacctttcaaagagctgtccggcatacggtcgttgcgaatcgcttccaccagcgctgcatcgccgtgcatttcaccatcaatcatcagttctggtgcacgttccctgaccagttccagcgcctgacgcattttgctgctgctcgggcagtcagaagaaccaaagttggagtggctcaacaaagcaacgcgcggctcaataccaaaacgacggacagtttctgccgccatcaaggtgatctccgccagctcttctgcatccggttcatcattaacatatgtatcggcaataaaggtgttaccactcggcagcagcagcgcgttcatggcacctgcggtgtgaacgccatcgcgataaccaaagacatttttcaccacgctaaaatgttcatgataatcacccaccgtaccgcaaatcattgcatcggcttccccacgctgaaccatgatcgcgccgatcactgtcgggttactgatcagcgcccgctgcgcctgttcctgagtgacgccgcgacgcttcatgatctggaagtattcggtccagtactctttaaagcgcggatcggattcgttattgacgatctcaaaatcaacgcccgctttgatctgcaagcccagtttctgaatgcgcatttcgatcacgttcggacgaccgataaggatcggtttcgccagtcccagcgttaccagttcctgagtggcatgcagaacgcgcgcctcttccccttccggcagaacaacgcgcttcggcgctttgcgagcctgggagaaaatcggcttcataaacaggttggttttgtaaacgaactcagtcagcttgtcgatgtagacgtcgaaatcagcaatcggacgagtcgccacgccgctctccatcgcggctttagcgaccgcaggagcgatcttaacgatcaagcgcggatcaaacggctttggaatgatgtattccggaccaaagctcagatcctgatcgccatacgcactagccaccacttcgctctgttccgcatgggcgagttctgcaatcgcacgtaccgccgccagtttcatctcttcgttgatggcggttgcgccaacgtccagcgcgccacggaagatgaacgggaagcacaggacgttgttcacctggttcggatagtcagaacgaccggtgcaaatgatggcatccggacgcacttctttcgccagcggcggcagaatttccggttccgggttcgccagcgccaggatcattggcgcacgagccattttcttcaccatttcctgggtcagcactttcgggccggaacagcccaggaaaatatccgcgccttcaatcacatcatcgagggtacgtttgccgtcatccaccaccgcatatgcggctttggtttccgccatgtttggctcacggccctgatagataacgcctttactatcgcaaaccacgatgttatgtttttgcagacccagcgctaccagcaggttcatacaggcgattgctgcggcacccgcgccggaaaccaccatccgcacgtcggagatgtttttctccaccacgcgcaagccgttgaggatggcggcagtgctgataattgccgtgccgtgctgatcgtcgtggaataccggaatattcatccgctcgcgcagtttctgttcaatatagaaacattctggcgctttaatgtcttcgaggttgatgccgccgaaggttggttcgagcgcggcgacaacttcaataaatttgtccgggtcgagttcgtcaacttcaatgtcaaatacatcaatcccggcgaatttcttaaacagaacgcccttgccttccatcaccggtttgcctgccagcgcgccaatgttgcctaaccccagcaccgccgtaccgttagagatcaccgccaccaggttacctcgggcggtatatttgtaggcttttaacgggtctttttcgatttcaagacaaggtgcggcaacgcctggactgtaggccagcgccagatcgcgctgtgttgccagaggcttggttggagaaacctggattttccctggaactggaaattcatggaaatcaagtgcactttgttttaactggtcatccatttggttgttcctttcacgtaacgttcacaaataaagtgtgtgggcaacagcccctgcccacaacgtggcgcacattattaccctgccggagtctacagactttgagcaagtccaaactctcaccattaatataatgttttggtaataatcctataacactgatgttacctgcttaatccagcaataccatgcctgtctgctatgcttttttgatgcgtttagcgaaatttctcagaagtgtgaattaacgcactcatctaacactttacttttcaaggagtatttcctatgaacgagttagacggcatcaaacagttcaccactgtcgtggcagacagcggcgatattgagtccattcgccattatcatccccaggatgccaccaccaatcctagcctgttactcaaagctgccggattaagtcaatatgagcatttaatagacgatgctatcgcctggggtaaaaaaaatggcaagacccaggaacaacaggtggtcgcagcgtgtgacaaactggcggtcaatttcggtgctgaaatcctcaaaatcgtacccggtcgcgtgagtacagaagttgatgcacgcctctcttttgataaagaaaagagtattgagaaggcgcgccatctggtggacttgtatcagcaacaaggcgttgagaaaagtcgcattctgatcaagctggctagcacctgggaaggaattcgcgcggcagaagagctggaaaaagaaggtattaactgcaacctgacgctgctgttttcttttgcacaggcacgggcctgtgcggaagcaggcgtttttctgattagcccgtttgtcgggcgtatttatgactggtatcaggcacgcaagccgatggacccgtatgtggtggaagaagatccgggcgttaaaagcgtgcgcaatatctacgactactataagcaacaccactatgaaaccattgtgatgggcgcgagcttccgtcgcaccgaacaaatcctcgccttaaccggctgcgatcgactgactatcgcaccgaatttactgaaggagctgcaggaaaaagttagcccagtggtacgtaaattaatcccaccttctcagacgttcccacgcccagctcccatgagcgaagcggagttccgttgggagcacaatcaggatgcgatggcggtagaaaaactgtctgaaggcattcgtctgttcgccgttgatcaacgcaaactggaagatcttcttgccgccaaactataaaccagccacggagtgttatatgtcccgaaaagaccttgccaatgcgattcgcgcactcagtatggatgcggtacaaaaagccaactctggtcatcccggcgcgccgatgggcatggctgatattgccgaagtgctgtggaacgattttcttaaacataaccctaccgacccaacctggtatgatcgcgaccgctttattctttccaacggtcacgcgagcatgctgctctacagtttgctacatctgaccggttacgacctgccgctggaagaactgaagaacttccgtcagttgcatagcaaaaccccaggccacccggagattggctatacgccaggcgttgaaaccaccaccggcccgcttggacaaggtttggcgaacgccgtcgggctggcgatagcagagcgtacactggcggcgcagtttaaccagccagaccatgagatcgtcgatcacttcacctatgtgtttatgggcgacggctgcctgatggaaggtatttcccacgaagtctgtagcctggcaggcacgctgggactgggcaagctgattggtttttacgatcacaacggtatttccatcgacggtgaaacagaaggctggtttaccgacgatacggcaaaacgttttgaagcctatcactggcatgtgatccatgaaatcgacggtcacgatccgcaggcggtgaaggaagcgatccttgaagcgcaaagcgtgaaagataagccgagcctgattatctgccgtacggtgattggctttggtagcccgaataaagcaggtaaggaagaggcgcacggcgcaccactgggggaagaagaagtggcgctggcacggcaaaaactgggctggcaccatccgccatttgagatccctaaagagatttatcacgcctgggatgcccgtgaaaaaggcgaaaaagcgcagcagagctggaatgagaagtttgccgcctataaaaaggctcatccgcaactggcagaagagtttacccgacggatgagcggtggtttaccgaaggactgggagaaaacgactcagaaatatatcaatgagttacaggcaaatccggcgaaaatcgctacccgtaaggctagccaaaatacgcttaacgcttacgggccgatgctgcctgagttgctcggcggtagcgcggatctggctcccagcaacctgaccatctggaaaggttctgttagcctgaaggaagatccagcgggcaactacattcactacggggtgcgtgaatttggcatgaccgctatcgccaacggcatcgcgcaccacggcggctttgtgccgtataccgcgacgttcctgatgtttgttgaatacgcccgtaacgccgcgcggatggcggcactgatgaaagcgcggcagattatggtttatacccacgacagtattggcctgggcgaagatggtccgacgcaccaggctgttgagcaactggccagcctgcgcttaacgccaaatttcagcacctggcgaccgtgcgatcaggtggaagcggcggtgggctggaagctggcggttgagcgccacaacggaccgacggcactgatcctcagtaggcagaatctggcccaggtggaacgtacgccggatcaggttaaagagattgctcgtggcggttatgtgctgaaagacagcggcggtaagccagatattattctgattgccaccggtagtgagatggaaattaccctgcaagcggcagagaaattagcaggagaaggtcgcaatgtacgcgtagtttccctgcccagcaccgatattttcgacgcccaggatgaggaatatcgggagagcgtgttgccttctaacgttgcggctcgcgtggcggtggaagcaggtattgccgattactggtacaagtatgttggtctgaaaggggcaattgtcgggatgacgggttacggggaatctgctccggcggataagctgttcccgttctttggctttaccgccgagaatattgtggcaaaagcgcataaggtgctgggagtgaaaggtgcctgatggtgattgccggatgctgattgccggatgcgacgctgacgcgtcttatccggcctacagcgtcttatccggcctacatgtcccgccattttgtttaacgggtgatccacaacgtgggccaggcgtctggcccatgccagttatcgcaggtgggttctgcggcgtaacgcaccaggcgaaaacgctgaccgtcaaagcgccagcgcgcctgaatgccacaatcgcttaatccgcgccctttcgctaaggtcaccagttcacggcttttctcatcaaatgttgcgttcatcagttccagttcattcgtctcctgaccgttgttgaacggcaaacgcaaccgaaccgggcggctagctagtggctttttacggctcacaatccatgccaaatcaatggtgttataggcccctgcctcacagctaatcatcatcagcgctttatcatcagtcagcgcagtgacattcacctcacgacgcaatggatcaaggctgcagcgcagaccattcatccgccagtttccataatccagcaaatcgttgcgttcttcgagactgagtggcgtcggcgttgggttaaccaccgcgacctctttcagcgcaggcgcgggcggtacgctgagcggcggttcgtcccctttcttgatccacgcggtttcactgccaacgcgcttttgctgagcatcaataaacaacaacgctgcttttaagccactcagagaaatggtctgatcgccatcgcgtaaggtgattgccttcccttcctgaatcatctgcaaaaacgcggtgatggttgccgtatcatcggttactaataaccatggactaatccgccacttgtcaccacttaacgccaacggctcgccatctaacagcagccgtggcgctatctccccttcactcgcctccgggctcttcaatccgccgcgctcaatacgtaaaacggcatcggtatgcgccccggcgctgcggctcagggtcatcaccagtccattatgatcgcccgtattacgcgccacgcagaaattttggttattacaggtgacctgccagtcggaaaacgcccgttgcgctggtgccgcccacaccaaagacgtcggcaacaaagcgaaaaaaaagagaaggaaaatgcgatagcgcatggacggtacgaccccagaagttcaaacaaacagcacaagtcgtatcttcgttgcgcaggtagcgcggctcaatcggatttgtcggattgagccaataataaacaacgaaatattattgttatttttcagtccattaaatgactcgtttgcaaatagttaagcaataacaccgtcttaccgtcacgtatctcgccggttttgatcatctccagcgcctggctgaacggcagctcgagcacttcaatatcttcatcttcgacaccgccaccggcgttagcgcgctgattgtcactgtattcggcgataaaaaagtggattagctcagtcacaccgcctgggctcatatacagttcaaataatttgcgcacttcacccacttcatagcccgtctcttcaatcgcttctttgcgaatacacacttccggttcgtcgttatccagcagcccggcgcagctttcaatcagctgcccgctttcattgccattaacccaggtagcgacacggaactgacgaatcagaaccacggtctttttcttcgtgttgtacaggaggatcgtcgcaccattgccgcgatcgtacacttcacgtttatggcggataacttcgccgtctttgcgcgtgagatcgtaagtaatgttgtgcagggtgaaatagttatcggagagaattttgtctttaatgagggtgatttgttgcgtcataccgactccacagcgcgaaatgaacaattatcttacgctgtgaagtcgggtttgtctgcgcaggctatcagtgagatttgacactttttacccccagccagtcaataatcccctgtgccgcatgacgtccttctgccattgcggtaaccaccagatccgcaccacgcacggcgtcaccaccagcgaagattttcggattggtggtctggtaacggtactggctttccacatccgcgatgatgcggccccatttgtctaccgttacaccgtggctctccagccacggcatcccgtgcggattgaagccaaacgccataatcaccgcgtcggctggcatgacaaattcactgccttccaccggcactggacgccgacgcccctgggcatccggctctccaagacgcgtgcgcaggaaacgaatcccgcagacgtgaccttgttcattcagctcaagcgccaccggctggacgttaaattcgaagttggccccctcttcgcgggcgttcttcacttctttcttgctgcctggcatgttagcttcatcacgacgataagcgcaggtgacgttactcgcgccgtggcgcagtgcggtacgcacacagtccatcgcggtgtcgccgccgcccagtaccacgacgttaagtccggcggtattgataaacggctcttccggtagctcttcgagccccatcacctgtttagtgttggcaatgaggaacggcagcgcgtcataaacgcccggcgcatcttcattgggtaaacccgctttcatggaacggtaagtgcctacgccaacgaagaccgcgtcgtattgttccaaaaggctatccaaagagacatctttacccacttcacaattgagttcgaagtgaatccccatcgcgctgaagatttcccgacggcgtgccagcagggatttatccagtttgaaagaaggaatgccgaaagtgagcaagccaccgatttctggatggcgatcgtacaccgtcacccccacgccattgcgggtcagaacatccgcacaggccagccctgccggacctgcaccgataatcgccacccgcttgtccactttggtgacatggcttaagtcaggacgccaacctttcgccaacgcctgatcactaatgtagcgttcaatgttgccgatagttaccgcgccgtgctcatcgcgaatagtacaggcaccttcacacaaacggtcttgcggacaaacgcgtccggtaatttccggcagggtgttggtctggtgagaaagctcgacggcggcgtcgatgtttccggctttcaccagttcaatccactgcggtatatggttatgcagcgggcaggtccattcacaaacgctgtgctcgccgcacttaaggcagcggctggcttcccgttgtgcctggtcggcgcgaaatggcagataaatttcatcaaaaccggttttgcgcgcttcaatcgccagtttatccggctcgccacgcgcgggcgttgcctgcatttgttcgactttactcattaccggcatttcttgcgccgcggtactggcatgccacggttgatgttcctgacgcgcggtgcgcaagcggcgggatttcgccatgccggagagtgcgacgtcagtgaccagttgcagcgcgtccgccgggcaattctcaacacaggcaggaccgttttcgcgccccgcacaaaggtcgcatttatgcgccgtggcttttacttttcctgccgcgacgggtgtcaggacgatttgcatcgtaccaaaaggacaggccaccacgcaggatttacagccaatacacttttgctgattgacctgaatgctgtcatcaacgtggctgattgcgccattagggcagctacgggcgcagggcgcatcttcacaatggtgacaggtcactgcactacgttgctgttgatgtttgataaccgtaattcggggatgaaaatggtgttggctcaggacatgttgctcatcattgtgagccatgacacaggcgatttcacaagcatgacaacccagacattgctgactgttggccataataaaacgattcataacgaccttcttttttggttgtaaaaaccttattctttatatgagtgttgttattacccgacttacaggggaatcggcaatgttcatgtgcccagaataagtaactatttcgctataaactgtggcagatcaaataatcccatcactgactaaattgcgtttcagcgaactggaacattaatgattttttgtggagaagacgcgtgtgattgttaaacgacccgtcagcgccagtctggcccgggcctttttttacattgtgctgctgagcattctttccacgggtatcgctctgctaactctggcgagcagtttgcgcgacgctgaggctatcaatattgccggaagcctgcgtatgcagagttaccgcctgggctacgacttgcaaagtggcagtccacaactcaatgcacatcgccagttatttcagcaggcactgcatagtccggtattaaccaacctcaacgtctggtatgtgccagaagcagtaaaaactcgctatgcgcatctgaatgccaactggctggagatgaataatcggctcagcaagggcgatttgccgtggtatcaggccaatattaataattatgttaatcagatagacctgttcgtactggctttacagcactacgctgaacgcaaaatgctgctggtggtggcgatttccctggctggcggcatcggtattttcacgctggtcttttttactttgcgccgcatacgccatcaggtggttgccccgctgaatcagctggttaccgccagtcagcgtattgaacacgggcagttcgacagcccgccgctggataccaacctgccgaatgagcttggtctgcttgcaaaaacctttaaccagatgagcagcgagctgcataaattgtaccgtagcctggaagcgagtgtagaagaaaagacccgcgatctccacgaggccaagcgtcgtctggaggtgttgtatcagtgtagccaggcgctgaacactagccagattgatgtgcattgtttccgccatattttgcagattgttcgcgacaatgaagcggctgaatatctggagttaaatgtcggtgaaaactggcggattagcgaagggcaaccaaacccggaattgccgatgcagattttaccggtgacaatgcaagagacggtttacggcgaactgcactggcaaaatagtcacgttagtagtagtgaaccgctgcttaacagcgttagcagcatgctgggacgcggtttgtactttaatcaggcgcagaagcattttcagcaattattgttgatggaagaacgtgcgaccatcgcccgcgaattgcacgacagcctggctcaggtactttcttacttacgtatccagttgacgttactgaagcgtagcataccggaagataacgccaccgcacaaagtatcatggccgatttttcccaggcgttgaatgatgcttatcggcagttacgcgagctgttgactactttccgcctgacgctgcagcaggcggatctcccctccgcattgagggaaatgctggatacgttacaaaatcaaaccagcgccaaactgaccctcgactgccgtctgccaaccctggcactggatgcgcaaatgcaggtgcatttgttgcaaattattcgcgaagcggtgctgaatgcgatgaagcacgccaacgccagcgaaatcgccgtcagttgcgtcaccgcgccggacggcaatcacacggtttatatccgtgataacgggattggtatcggtgaaccgaaagaacccgaaggtcattatggtctgaatatcatgcgcgaacgcgcggaacggctaggtgggacgctgacttttagtcaaccttccggcggcggcacgttagtgagtattagctttcgctctgcggagggtgaggaaagtcagttaatgtaatgcctcctactgaccaaagaatacttgcacttaaggttcagtataaaagggcatgataatttacattaactcctttttttctccacgattggctcgtaccttgccgctacagtgaagcaagtcaagcctacaacgatacgcagaaacacgaggtcctcttttaatggcgaatttctttattgatcgccccatttttgcctgggtgctggcaatcctgttgtgtctgacaggtaccctggcgatttttagtttgcccgttgaacaataccccgatctcgcgccaccgaatgtgcgagtgaccgctaactatcccggcgcaagcgcccagacgctggaaaacaccgtgacccaggttatcgagcaaaatatgaccggcctcgataatctcatgtatatgagttctcagagcagtggcaccggtcaggcatctgtcactttaagttttaaagcaggcaccgatccggacgaagccgtgcagcaagtacaaaaccagctgcaaagtgccatgcgaaagttaccgcaggcggtgcaaaatcagggcgtgacggtgcgtaaaaccggcgataccaacattctgaccattgccttcgtctctaccgatggtagcatggataaacaggatattgctgattatgttgccagtaatattcaggacccgttaagccgcgtgaatggcgtcggggatatcgatgcctatggtagccaatattccatgcgtatctggctggacccggcgaaactcaacagtttccagatgacggctaaagatgtcactgatgccattgagagtcagaacgcgcagattgcggttgggcaacttggtggtacaccttccgtcgataagcaggcgctcaacgccaccattaacgcccagagtctgctgcaaacaccagaacagttccgcgatatcaccttgcgggtcaatcaggacggcagtgaggtaaggctgggcgatgtcgccaccgtcgaaatgggggcggagaaatacgattatcttagccgcttcaatggtaagccagcctccgggctgggggtaaaactggcctccggcgctaacgaaatggcgacagcggagctggtgctcaatcgtctcgacgagctggcgcagtatttcccgcatggactggaatacaaggtggcgtatgaaaccaccagctttgttaaagcctccattgaagacgtggtgaaaacgctgctggaagctatcgctctggttttcctcgttatgtatctgttcctgcaaaacttccgcgccacgctgatacccactatcgccgtgccggtggtgttgatgggaaccttctccgtactttacgccttcggttacagcgtcaacaccttaaccatgttcgcgatggtgctggcgatcggtctgctggtggatgacgccatcgtggtggtggaaaacgtcgaacgtattatgagtgaggaaggactcactcctcgcgaagccacacgtaaaagcatggggcagatccagggggcactggtcgggattgcgatggttcttagcgcggtatttgtaccaatggccttcttcggcggcaccaccggtgccatctatcgccagttctctattaccattgttgcggcgatggtgctgagtgtactggtagcgatgatcctcactccggctctgtgtgccacactacttaagccactgaaaaaaggtgagcatcatgggcaaaaaggcttttttgcctggtttaaccagatgtttaaccgcaacgccgaacgctacgaaaaaggggtggcgaaaattctccaccgtagcctgcgctggattgtgatttatgtcctgctgcttggcggcatggtgttcctgttcctgcgtttgccgacgagcttcttaccgctggaagaccgtggcatgtttactaccagcgtacagttgcccagcggtagtacgcaacaacagaccctgaaagtcgttgagcaaatcgagaaatactacttcacccatgaaaaagacaacatcatgagcgtgtttgccaccgttggttctggccctgggggtaacgggcaaaacgtggcgcgaatgtttatccgcctgaaagactggagcgaacgcgacagtaagaccggcaccagctttgccattatcgagcgtgcaacgaaggcgtttaaccaaattaaagaagctcgcgttatcgccagcagcccgccagcaattagcggtcttggtagttctgcaggttttgatatggagttgcaggaccacgctggagcgggtcacgatgcgctgatggcagcacgtaatcagttgctggcgctggcggcggaaaacccggagctaacccgtgtgcgccataacggcctcgacgacagtccgcagttgcagattgatatcgaccagcgtaaagctcaggcgctgggcgttgctatcgacgatattaacgacacactgcaaaccgcctggggtagcagctatgtgaatgactttatggatcgcggtcgcgtgaagaaagtctatgtgcaggcagctgcgccgtatcgcatgctgccagatgacatcaatctctggtatgtccgaaataaagatggcggcatggtgcccttctctgctttcgcgaccagtcgctgggaaacaggcagcccgcgtctggaacgctataacggttattctgcggttgagattgttggggaagccgcaccgggggtcagtaccggtacggcgatggatattatggaaagcttagtgaagcagctgccaaacggctttggtctggagtggacggcgatgagctatcaggagcggctttccggcgcgcaggctccggcgctgtacgccatttccttgctggtggtattcctgtgtctggctgcgttgtatgaaagctggagcgtgccgttcagcgtaatgctggtcgtgccgctgggggtaatcggcgcgctgctggcaacctggatgcgcgggctggaaaacgacgtttacttccaggtgggcctgttaacggtcattggtttaagcgcgaaaaacgccatcctgatcgtcgagtttgctaacgagatgaaccaaaaaggccacgacctgtttgaagcgacgctccacgcctgccgtcagcgtttacgcccgattctgatgaccagcctggcatttatcttcggcgtattgccaatggcaaccagcacgggtgccggttccggtggtcagcatgcggtgggtactggcgtaatgggcgggatgattagcgccactattctggctatttacttcgtgccgctgttctttgtgctggtgcgccgccgcttcccgctgaagccgcgcccggaataagcaataaaaaaggcgacatgccaatgtgtcgcctttttcaactttccgattaagaacctgctcagcgggttcttgctgtttgtactttgtctcaggaattacttacgaagcataacttcgataaagtctttccagttccccagttcacgttcaatcataacaacctctcttataattatgggtattctacggaaacaatataccgtggtgaagctaatttactcgattgctgcgatgactacctccgggggacaaatcttatgtaaatactatggtcctgcggtgatgatttgtatgtgatacacagcaacatttcgagatattcatacggcatctaatactgatttaattctggttaaaatacagacagataacaagatgaatattcttaatgtttacgttaaaaatgtttaatattatttaatagttgttaatttgaatacttcgataatgttatatttcctgataatcatttgcaggcaaaatgttttcacccttaaatgagtatttattctcataaatcgaaaaaggattcattatggttacactttacggtatcaaaaattgtgacaccattaaaaaggctcgccgttggctggaagccaataacatcgactatcgttttcatgattaccgcgtcgatgggctggacagcgaattattgaacgattttatcaacgaattaggctgggaagcgttactcaacacccgtggtacaacctggcgtaaactggacgaaaccacccgcaataaaatcaccgatgcggcctctgcggcggcattaatgactgaaatgcctgcaattatcaaacgtccattgctctgcgtgcccggtaagcctatgctgctgggtttcagtgattccagttatcagcaatttttccatgaggtgtaatctatgagctgcccggttattgagctgacacaacagcttattcgccgcccttccctgagtcctgatgatgcaggatgccaggctttgttgattgaacgtttgcaggcgatcggttttaccgttgaacgcatggactttgccgatacgcagaatttttgggcatggcgtgggcagggtgaaacgttagcctttgccgggcataccgacgtggtgccgcctggcgacgccgatcgttggatcaatcccccgtttgaacccaccattcgtgacggcatgttattcgggcgcggtgcggcagatatgaaaggcagcctggcggcgatggtggtggcggcagaacgttttgtcgcacaacatcccaaccatacggggcgactggcatttctgatcacctctgatgaagaagccagtgcccacaacggtacggtaaaagtcgtcgaagcgttaatggcacgtaatgagcgtctcgattactgcctggttggcgaaccgagcagtatcgaagtggtaggtgatgtggtgaaaaatggtcgtcgcggaagtttaacctgcaaccttaccattcatggcgttcaggggcatgttgcctacccacatctggctgacaatccggtacatcgcgcagcacctttccttaatgaattagtggctattgagtgggatcagggcaatgaattcttcccggcgaccagtatgcagattgccaatattcaggcgggaacgggcagtaacaacgttattccgggtgaactgtttgtgcagtttaacttccgcttcagcaccgaactgactgatgagatgatcaaagcgcaggtgcttgccctgcttgaaaaacatcaactgcgctatacggtggattggtggctttccgggcagccatttttgaccgcgcgcggtaaactggtggatgcggtcgttaacgcggttgagcactataatgaaattaaaccgcagctactgaccacaggcggaacgtccgacgggcgctttattgcccgcatgggggcgcaggtggtggaactcgggccggtcaatgccactattcataaaattaatgaatgtgtgaacgctgccgacctgcagctacttgcccgtatgtatcaacgtatcatggaacagctcgtcgcctgatgagtggttctgcaagaggaaataagcatggactggctggctaaatattggtggattctggtgattgtctttttggtaggcgtcctgctgaacgtgattaaagatctcaagcgcgtcgaccataagaaatttctcgccaacaagccggagcttcccccgcatcgtgatttcaacgataagtgggacgatgacgacgactggccgaaaaaggatcaaccgaagaagtaagctgagtgctcaaccgtaggccggataaggcgttaacgccgcatccggcaatggtgaacgatgcctgatgcgacgctcacgcgtcttatcaggccaggtaatctgtcttttacatcatttcaatcacatcatcatcgccaggcttaccgccacttagcgcttcgtcgaaataatgtttcggaatggtataacgcaagtgatccagggcaaattgcatactgcgattgtcgatcgcatggcctaaatcctccacgatatccagcgtcacgtcaccaccggcactgattaacgcttcctgcgccgcaaccgcatgcgccagatcgataaccggatcttcaccgccatgaatcaggtgaattgtcgtggctgtagacgcagtttccggcaggctcgcatagcgtccgttaaaagcaatgacgcgactagcaaggcccggttcggctttaatgctctccagcaccataatcgcgccttgagagaaaccgatgagcgccgtggcgttagcccctactccgctctgtttctgccagtagcgcaccgtttcaataaacgtcggcatgatcgcatccacacgcgcctggcgattatcttccgtaataccctgcacgctaaaccactgacgccccgccggattaccgctcggctccgcgccaccgacactcaccaccagcgcatcaggaaacagcggtgcaaaccagttgcctatttcccccattgccaccgggttatccccgacaccgtggaaaagcagtaacaactgttgcgcaggtttatccgggctttgaacaacaaaatggtcatgtttcatggcgaactccttaactgatgtcattaattttacgccgctgactcacaatgaccatgagataaaattgaaggagtcagtgaaataattgccattgcgttatgcgatcgcgcagacgctcagtgcgaacatcattaagtgcgaacagcgcctgcgcggcctcttcccgctgacggaccagtaacatcttgcggccactaagtttaagtgtggtacataactgcgcatcactggcgtttttctgtaaacgcccacgcagcgccggtaatgccagttcactggtttgtaacagacgcaataagcaacctaagctcgttaatagcggacgatgagcgaaagcaaaaccggccagttcaagccagtcgtcgtcagaaaggacggcatcgtttagtggatcaacaggaagcgtttcgccattccactgcgcgagagcttgcgcatcgcgacgtaaacggtaatgctcacgttcagccagctgtttacccgcatcactcatcggtaacagcgccatcgccgtatagcaaccgctgctggcttcccgatgattacccatccgcaccagcacaaaaccgcagcgttgccagaaacgccataactccccggtgtaaccaaaactcacgctaagatagtcgaggtcttgcgtatattgcaaagcaccagcaataagttgccgccctgtgccttcccgctgacgagccggatgaactgctatccggctgacccgccgtccacgcaatgtcgccgccagtggattgttgccgtgcgccgccaggctctgggccaccagattaccccgcgggcgacgaaaacctgcccataccgcctgactgagttgttgagataatccaccctcatccaccagccacagcgccccggcaatctcgttttcgccagccgcctgtaaaaaatgttgccctggtgcatccatcatccggcgtaaatccagcgggctagtccgatagtgcgcaccagacaagagctgataaacctttaacggcgtttctggatcgctttgccataacgtctgttcaaatgcggaaatgacaatattgccttgtggtgtatgggtgaagttttcatcgtcaaaaaccagtgcctcgctgaccattttttccagcgggcatccctgcgcccagcggatcggctgttgcagttcaaaacggtgtaaatgcggaaagcgagcgcaaaatttcagcaaaaaaccacgtccggtgccttcgtagccctgcaccgtagtggttaacaacgttcgaggaaaacggcttaccagttgatgcaacaatggcgcaggtatggctgcggcttcatcgaccaccagccagtcggcttgctcatcgctggctaacaaggcatccggcgcaataaagcgaaacttctcgcccgcaaattgtgccagtacatccgtactcgcttttgcgggcgcggtgacaatcgctctgcccgcaatacgagaaatgagttgccctgccaacgcgctcttaccgcgcccacgcgcagccgttaccgctgccacgcccggcggcatggtcattagctgctttaagagttgctgttgttctggttgtggtgcgccagtcgcggggtaccagtcagtacggggagtaaaatgcgccaagctgaatggctggttttgccgccagaggatagcctcgttatccgccgtaagtacgcgtttgagatgctggacaaaatgcggcgtcgcaatagggtcagggcaatcactccagcgcaggctgtcggcatcaggttggttttcccactcttcccatacagggagtaacaaaaccagccagcttcccgctttcaacgttccgctaagtgcggcaaaggcagcggcatcaaagccgtggcgggcgtcgaataccgcatgccggaactcgcgcccaagtaaagtttgtagtgcgctgggagaacagtggttttcagcatctggccgcgggctaatccacagccagtcgccaggtaaggcatcacgcaacttaagagtatgctcaaaacaccaaccctcttccccgctcaacaccagcaagcggcggatcccttcacgtttcatttgcgctgttaatgtgtgaagcgcagtcagttcagccatccctgccccggaagttaaatgcttttaccaaaagtattgcattgtgccggatcgccgctgtcgaaaccacgtttaaaccagctgtagcgttgctgagaagtgccatgagtgaaactgtctggtactactcgcccctgactttgctgttgtaaacggtcatcgccgatggcctgcgccgcgttcagcgcctcttccagatcgccggtttccagaacgccttgctgctgcatactatgcccccagacaccggcaaaacagtcggcctggagttccatacgcacagataagcggtttacttccgcctgcgtcgcgttttgttgcagttgacgaactttcggctcgatgcctaacagtttctgcacatgatgaccgacttcatgggcgataacgtacccctgggcaaaatcgccatccgcgccaagtttgtctttcatgtcatcatagaaggagagatcgatataaaccgtgccatccgccgggcaatagaacggccccattatggactggcccgccccgcagccggtacgcgtcattccacggtacatgaccagcttcggttgctgataggtcttacccatcttctcgaactgttgtccccaggtgtcttccgtggttgccagaatcacgctggtgaattttgcggcttcgtcttcatttgggctaatactccgcgtactttgttgttgggaaaccggctgcccggtcatcaacccggttaaatcaacaccatagtagcctgcaaccagcacgactatcagtaaaatcagcccgcctttaccgcttggcaggcgaaaaccgggaccgcccatagatggaccaccagagctgttgcgcctgtcttcaacattgtcactttcacgtcgcccttgccaacgcatagatacctcaacaatatattcattatagaaatgatcgtaggtggttcagaggaagattaccacaggaaagcgggatgaaatggcggaggaatgagcgttcaatgcatatattccgagagcggttgtcttgccgtgccagctgcacggcaagatgatgaacagaaaaatcagtccagctgtacacccaggcggcgggcgacggcttcataggcttcgatcaggccaccgaggctctggcggaaacggtctttgtccattttctccagcgtttctttgtcccacaggcggctaccgtccggggagaactcatcacccagtaccacttcgcctttgtacagaccaaattccagcttgaagtcgaccagaatcagaccagcatcatcgaacagttttttcagcacgtcgttcgctttgtaggtcagctctttcatacgcgccaggttctctttgctcacccagccaaaggtttcgcagtaagattcgttgaccatcggatcgtgcatggcgtcgtttttcaggaacagatcgaacagcggcgggttcagctcaataccttcttcgattccaagacgtttcaccagagagccagcagcacggttacgcacgacacactcaaccggcaccatatccagctttttcaccagacattcggtatcggagagcagacgctccatttgagtcgggatacccgcttcagccagtttgctcataatgaagtagttgaacttgttgttcaccatacctttgcgatcaaactgctcaatgcgcgcgccatcccctgcactcgtatcattgcggaattcgagcaccaacaggtccgggttttccgtgctgtatacggttttcgctttaccacgatacaactcagcttgcttttgcatctttatcactcctgggtgtgaattaacgttttaaaatcttttgctgtctggtgtgccggatgttttgtcggatgcggcgtgaacgccttatccgaactacgtccgacaaacaaatttcgtgcgaattaccgctaaaatcgcgttttcctgcagacgcacacgtttgcgtatcatatcagaaaaaagggccggatgattccagccctgtatttttacttgctaaacgcagcctggaagacagctaccagcgcgtcgttctgactctgagtcagagtatgacctttcggatcgatgaactgtaggctgctgcggttatctaaatcgccaacctgcagtttatagtcaccggatgccaggcctggatcgctcgcgcccagttcctgccagtcgctgtcagacagcggcttataagttacggccatgttgccctggctacgggtgctgtcggtcactttcatgcccactttttccagcgccgctggcagacgttgccaaaccacattgaacggcccgcgtacgaccagcattggtaaaccggtgtcatcagctgcactttgtacgtccatagtggtggaggcacgattttgcgcagcgttcgcggcgtcagtggcagatttatccagaccggcggaaataacgttcatcatctccgtgctgtaacgctgcatggaagccgcgtctgcaaccggtttgcccgcctgttccaggttcagcagtttaaccgtaaccgcctgctgataaccctgcggcttaacagagatttgataacgaccacgatactgctcgtcttcgtccagacggttccattgtacccaatcggtggtcagtgtctgaccagcatcatcacgttgggtgatggtgtagtttttcgcctgcagcacgctaaccacctgcggccacagagtattgccacgaccattttccaccagcaaactagcggtatcgcccgtgaactgggtacgcgcgccagaaaccagtgccagcggctgggctggtggacgaatgtccagcgccttaccgacagcaccactaccgttggtcaccgggattgcataatcaccggaggtcaccggcaaaatcattccagccggggcatgaagctccgcaagcggtgccgcttccaggtaggcttcatcaccactgacctgacgcttatagcgactgtcagaactacaggcagcgagtaataaaacaaggctaacacccgcaacctttgccaggcggctcttttgaacagagtaagccatcaaatctccctaaactttacagcaaaccggcatgcttaagcgccgctctgaccgtctcacgaccactgtcggtgattggtgtcattggcaggcgcagcgtatcggtcgccacaagacccagttccttacatgcccatttcaccgggattggattgggttcgacaaatagtttgttgtgtaatggcatcagacgctgattaataacgcgtgcctcggcaaaatgcccttctgctgccagtttgcacatctgggccatatcacgcgctgcgacgttagccgtaacggaaataaccccatgaccgcccaattgcatgaagtccagcgcgctcgcatcatcgccgctcagcagaacaaaatcatcactaaccagctctttgatctggtttacacgcgttaagttccctgttgcctctttgattccgataatattttttactttcgccagacggcccaccgtttccgggagcagatcgcagccagtacgggacggcacattatacagaatttgcggcaggtcagtatgctcagcgatggctttgaaatgctgatacaaaccttcttggctcggacgattgtagtaaggggttaccgtcaggcagccgacgataccactgtcattgaagcgctgcgtcaggctaatggcttccgcagtagcgttagcgccggtcccggcaattaccggaatgcgcccatcagccagatccagcgtcatcatcaccacatcagcatgttcgtcatgatttaaggtagcggactcgccagtggtgccaacagaaacgatcgcgctagtaccgctggcgacatgataatcaatcagttttttcaagctagcccgacagacattacctttttcatccatcggagtaacaatcgcgacaatacttcccgtgaacatgggccatcctctgtgcaaacaagtgtctcaatggtacgtttggtatggcattaaaagcaagcagacagaaccgttctgattgttgtatgcatgttttttttatgctttccttaagaacaactcaccccttaaaggaataaccagtttgacactgagtagccaacattatctggtgatcactgcgttgggtgccgatcgccctggaattgtgaacaccatcacccgtcatgtcagtagttgcggctgtaatattgaagacagtcgcctggcgatgctgggagaagagttcacgtttattatgctgctttccggtagttggaatgccattactctgattgaaagtacgttaccgttgaaaggtgccgaactggatcttttaatcgtgatgaagcgcacgacggcgcgtccgcgtccgccaatgccagcatctgtctgggttcaggtcgatgtggcagactccccgcatttaattgaacgcttcacagcacttttcgacgcgcatcatatgaacattgcggagctggtgagccgcacgcaacctgctgaaaatgaacgggctgcgcagttgcatattcagataaccgcccacagccccgcatctgcggacgcagcaaatattgagcaagcgttcaaagccctatgtacagaactcaatgcacaaggcagtattaacgtcgtcaattattcccaacatgatgaacaggatggagttaagtaatgaatccactgaaagccggtgatatcgcaccgaaatttagcttgccggatcaagacggagaacaagttaatttgaccgacttccagggacagcgtgttctggtttatttctacccgaaagccatgacccccggctgtaccgtacaggcctgcggcttacgcgataacatggatgagttgaaaaaagcgggcgttgatgtgctgggtatcagcaccgataaacccgaaaaactctcccgttttgcggaaaaagagctgcttaactttacgctcctgtctgatgaggaccaccaggtgtgcgaacaattcggcgtctggggtgaaaagtccttcatgggcaaaacctacgatggcattcatcgcatcagcttcctgattgacgctgatggcaaaatcgaacatgtctttgacgatttcaaaaccagcaatcaccacgacgttgtgctgaactggctgaaagaacacgcctgattactttgctccattccgtgctggctgcgcttgcggccagcatacctcacttctcgtgatcaagatcacattctcgctttcccctgcgacacgggtgtcgaatccattttttgctgaacgttaatgaccatcatttttgtaccgttcagaatccagttaatacataacttattgaatatattgagttaatcagaatggcatcctttatgcaatatgaaatgcaatgtttcatatcattttcaaggagccgacatgaaccgctttgtggtggccgaaccactgtggtgtacaggatgtaatacctgtctcgctgcctgtagcgacgtgcataaaacgcaaggtttacagcaacacccgcgcctggccctggcgaagacgagtacaatcactgcccctgtcgtgtgtcatcactgtgaggaagccccttgcctgcaggtctgcccggtcaatgccatctctcagagggatgatgcgatccaactcaacgaaagcctctgtattggctgcaagctttgcgccgtggtctgcccatttggcgcaatcagcgctagtggaagccgtccggtgaatgcccatgcgcaatatgtttttcaggctgaaggcagtctcaaagacggcgaagaaaacgcgccaacacaacatgctttgctgcgctgggaacctggtgtccagaccgtcgcggtgaaatgcgacctgtgtgatttcttgccagaaggtccggcctgcgttcgcgcttgcccgaatcaggcgttacggctgatcaccggtgatagcctgcaacgtcagatgaaagaaaaacagcgccttgccgcaagctggtttgccaatggcggggaggatcccctttccctcactcaggagcaacgctaatggatgccctgcaattattaacctggagcctgattctctatctgtttgctagtctggctagcctgtttttactcggtctggacagactggctattaagctttccggcatcacaagcctggtgggcggcgtgattggcatcatcagcggaattacgcaattacatgctggtgtaactttagtcgcccgttttgcccccccttttgaatttgccgatttaaccctgcgaatggatagcctcagcgcatttatggtgctggttatctccttgctggtggtggtttgttctctctatagtttgacttatatgcgcgaatacgagggcaaaggcgcggcggcgatgggcttctttatgaatattttcatcgcaagcatggttgccctgctggtgatggacaacgctttttggttcatcgtgctgtttgaaatgatgagcctgtcttcctggtttctggtcattgccaggcaggataaaacgagcatcaacgctggcatgctctacttttttatcgcccacgccggaagcgtgctgataatgatcgccttcttgctgatggggcgcgaaagcggcagcctcgattttgccagtttccgcacgcttagtctttctccggggctggcgagcgcggtgttcctgctggcctttttcggttttggcgcgaaagccgggatgatgccgttgcacagctggttgccgcgcgctcaccctgccgcaccaagccacgctagcgcgttgatgtctggcgtaatggtcaaaataggtattttcggcatcctgaaagtagcgatggatctgctggcgcaaacgggtttgcctctgtggtggggcattctggtgatggcgatcggcgcaatctccgcgctcctgggcgtgctatatgcgctggcggaacaggatatcaaacggctgctggcctggagtaccgtcgaaaacgtcggcattattttgctggcagtcggtgtggcgatggtcggtctgagtctgcacgacccgctgctcaccgtggttggactgctcggcgcactgtttcatctgctcaaccatgcgctgttcaaagggctgctatttctcggcgcgggagcgattattagccgtttgcatacccacgacatggaaaaaatgggggcactagcgaaacggatgccgtggacagccgcagcatgcctgattggttgcctcgcgataagcgccattcctccgctgaatggttttatcagcgaatggtacacctggcagagcctgttcagtctaagtcgtgtggaagccgtagcgctacaacttgcgggtcctattgctatggtaatgctggcagtcactggtgggctggcagtaatgtgcttcgtaaaaatgtacggtattactttctgtggtgcgccgcgcagtacacacgctgaagaggcacaggaagtgccaaatacgatgatcgtcgccatgctactgctcgcggcactctgcgtattaattgcgcttagtgccagttggctggcaccgaagataatgcatattgcccatgcgtttaccaatacccctcccgccactgtcgccagcggaatagcacttgtacccggcacgtttcatacacaggtcacccccagtttactgttgctgttactactggcgatgcctttgctgcctggcctttactggctgtggtgtcgtagccgccgcgcagcgtttcgtcgcacaggagatgcctgggcatgcggctacggctgggaaaatgcgatggccccgagtggcaatggcgtgatgcagccgctgcgtgtggtcttttctgcgctatttcgtctacgacaacagctcgaccctacgctgaggctaaataaaggtcttgcgcacgtcaccgccagggctcagagcacagaacccttctgggatgagcgggtgatccgccccatcgtgagcgccacccaacggctggccaaagaaatacagcatctgcaaagcggcgactttcgtctctattgcctgtatgtggtcgccgcactggttgtgctgctaatcgctattgccgtctaaggaaatcaccatgagacaaactctttgcgacggatatctggtcatttttgcgttagcacaggccgtgattctgctgatgctaaccccactttttacgggtatttcccggcagatacgcgcgcgtatgcactcccgccgcgggccggggatctggcaggattatcgcgatatccacaaactgtttaaacgccaggaagttgcgccgacatctagtggtctgatgttccgcctgatgccgtgggtattaatcagcagcatgctggtgctggcgatggccttaccactgtttattaccgtttccccttttgcgggcggcggcgatctgatcacccttatctatcttcttgccctgtttcgttttttctttgctctttccgggctggataccggaagtccgtttgcgggagtcggtgccagtcgcgagttgacgctcggcattctggtcgaaccaatgcttattctcagtctgctggtattggcgctgatagcaggttccacgcatatcgagatgatcagcaatacgctggcgatgggctggaacagcccgctaaccaccgtactggcgttactggcctgtggttttgcctgcttcattgagatgggaaaaattccctttgatgttgctgaagcagaacaggaattacaggaaggcccgctgaccgaatattccggtgccgggctggcgctagcgaaatgggggctggggctgaaacaggtcgtgatggcaagtctgtttgtggccctgtttctgccctttgggcgcgcgcaagaactttctctcgcctgcctgctgactagtcttgtcgttacgctgctcaaggttttgctgatttttgtactggccagtatcgcagaaaacacgctggcacgcgggcgttttttactcattcaccatgtgacctggcttggcttcagccttgctgcgcttgcatgggtcttctggttaaccggtctgtaaggagcactgacggaatatggaaaatcttgctctgacgacgttattgctgccttttatcggcgcactggtcgttagctttagcccacaacgtcgggccgccgaatggggggttttgttcgccgcgctgaccacgctgtgcatgttgagtctgatctccgcgttttatcaggccgataaagttgccgtcacgttgacgttggtcaacgtgggggatgtggcgttgtttggcctggtcattgatcgcgtgagtacgctgattctgtttgtggtggtgtttctcggtttgctggtcacgatctactccacgggttatctgacggataaaaatcgcgaacacccgcataacggcacgaatcgttattacgcatttttactggtgtttatcggcgcgatggcgggactggtactctccagcacgctgctcggtcagttgttgttttttgaaattacaggcggctgctcctgggcgttgatcagttattaccagagcgataaagcgcagcgtagtgcactaaaagcgttacttatcactcatatcggcagcttggggttgtatcttgccgccgccacgctgtttttgcagaccggaacgtttgcgcttagcgcgatgagcgagttacacggcgacgcacgttatctggtttatggcggcatcctgtttgccgcgtgggggaaaagcgcccagctaccgatgcaagcgtggctaccggacgcaatggaagcgccaacaccgatcagcgcctatctccacgccgcaagcatggtgaaagtgggcgtttacatttttgcccgcgctattatcgacggcggcaatatcccgcatgtgattggcggcgttggcatggtcatggcactggtcaccattctttatggctttctgatgtatttgccacagcaggatatgaagcggttgctagcctggagcaccatcactcaacttggctggatgttcttcggcttgagcctctccatcttcggcagccggctggcgctggagggcagcatcgcctacatcgtcaaccacgcgttcgctaaaagcctgtttttccttgtagcaggtgcgctgagttacagctgcggcacgcgcttgttgccgcgtctgcgtggcgtattgcacaccctgccgttgccaggcgtgggtttctgcgtggcagcgctggcgattaccggcgtgccgccgttcaacggcttcttcagtaaattcccgctgtttgctgccggttttgcgttgagtgtggagtactggatcctgctgcccgccatgattcttctgatgattgaaagcgtcgccagtttcgcctggtttattcgctggtttggtcgcgttgtgcctggcaaaccgagcgaggccgtcgccgatgccgcaccgctgccaggaagtatgcgcctggtgttgattgtactgattgtgatgagcctgatttccagcgtaatcgccgcgacctggttgcagtaaggagatgatgaatgaccggttctatgatcgtaaataatctggcgggactgatgatgctgacaagcctgtttgtgattagcgtcaaaagctatcgcctgagttgcggattttacgcctgccagagtctggtgctggtgtctattttcgccactctcagctgcctgttcgccgcagagcaactgctgatctggtccgccagcgcctttatcaccaaagtgctgctggtaccgttaatcatgacttacgctgcacgaaatattccccagaacatcccggaaaaagcgttattcggtccggcaatgatggcactgctcgcggcgttaattgtcctgctttgcgcatttgtcgttcagcccgtgaagctaccgatggctaccgggctgaaaccggcgctggcggtagcgttaggtcattttctgcttggcctgctgtgcattgtcagccagcgcaatatcctgcggcaaatttttggttactgcctgatggaaaacggctcccatctggtgctggcgcttcttgcctggcgagcaccggaactggtggaaataggtatcgctaccgacgccatcttcgccgtcattgtgatggtgttactggcaagaaaaatatggcgtacccacggcacgctggacgtgaacaacttgaccgcgctgaagggataatgagatgagttattctgtgatgttcgctttactcctgctcacgccgctgctttttagcctgctctgttttgcctgccggaaacggagactttctgcgactcgcacggtgaccgtattacatagcttagggatcacactgctgctgattctggcactctgggtggtccaaactgccgctgatgcaggagaaatattcgctgcgggactgtggcttcatattgatggtctgggcggtttgttcctcgccattcttggtgtgattggctttctcaccggtatttacagcattggctacatgcgtcatgaagtggcacacggcgagcttagtcccgttacgctgtgcgattactacggtttcttccatctgtttttgttcaccatgctgctggttgttaccagcaataacctgattgtgatgtgggcggcgatcgaagccaccaccttaagcagcgcgtttctggtaggcatttacggtcagcgtagtagcctggaagctgcatggaagtacatcattatttgtactgttggtgtcgcttttggtctgttcggtaccgtgctggtatacgccaacgccgccagcgttatgccgcaggcagaaatggcgatattctggagcgaggttcttaagcaaagctccttgcttgacccaacattaatgctgttggcctttgtgtttttgctaattggctttggtaccaaaaccgggctatttcccatgcacgcctggctgccggatgctcacagtgaagcgccgagtccggtcagcgccctgctctccgccgtattgctgaactgcgcgctgttggtgctgattcgctattacatcattatttgccaagccatcggcagcgatttccccaaccggttgttgctcatcttcggcatgttgagcgttgccgtggcggcatttttcattctggtacagcgggacattaagcgtctgctggcgtactccagcgtggagaacatggggctggtcgcggtggagctaggcattggcgggccgctgggaatttttgccgcgctgctgcacatcttaaaccacagtctggcaaaaacgctgctgttctgcggttccggcaatgtactgctcaagtacggcacgcgcgatctcaacgtcgtctgtgggatgctcaaaatcatgccatttaccgccgtgctgtttggcggcggtgcgctggcgctggcagggatgccgcccttcaacatttttcttagcgaatttatgaccattaccgccggactggcacgtaatcacctgctgattatcgtcctgctgttattgctgttaacgctggtgctggcgggcctggtacggatggctgcgcgggtgttaatggcgaaaccgccgcaggccgttaaccggggtgatctcggctggttgaccaccagcccaatggtgattctgctggtcatgatgctggcgatgggaacgcatattccacaacctgtcatcaggatcctggcgggcgcttccactatagtcctcagtgggacgcacgatctgcctgcacaacgtagcacctggcatgattttttgcctagtggcaccgcatctgttagcgagaaacacagtgaacgttaatagtagcagtaatcgtggcgaagcgattctcgccgccctgaaaacgcagttccccggcgcggtgctggatgaagagcgacaaacgcctgaacaggtcaccattacggtgaaaatcaatctgctgcctgacgttgtacagtatctttattatcaacatgatggctggcttccggtcctgtttggcaacgacgagcggacacttaacggtcattacgcggtttattatgcccttagtatggaaggggccgaaaaatgctggattgtggtgaaggcgctggtcgatgccgacagtcgggagtttccgagtgtcacaccgcgcgtccctgccgcggtctggggcgagcgagaaattcgcgatatgtacgggctgattccggttggcctgccggatcagcgtcgcctggtgttgcccgatgactggccggaagatatgcatccgctgcgcaaagatgcgatggattatcgactgcgccctgaaccgacgactgattccgaaacgtatccgtttatcaatgagggcaacagcgatgcgcgggtgatccctgtcggcccgctgcatatcacctccgatgaaccgggtcacttccgcttgtttgtggatggcgagcaaattgtcgatgctgattaccgcctgttttatgtccatcgcggcatggagaaactggcagaaacgcggatgggctacaacgaagtgaccttcttaagcgaccgcgtgtgtgggatttgcggttttgcccacagtgtggcctataccaatagcgttgaaaatgcactggggattgaggtgccgcaacgagcacatactattcgcagcattctgctggaagtcgaacggctacacagtcatttgcttaaccttggcctctcctgccatttcgttggttttgataccggctttatgcaatttttccgcgtgcgggaaaagagcatgacgatggcggaattgctgatcgggagccgtaaaacctacggtctgaatctgattggtggtgttcgccgcgatattctcaaagagcaacgtctgcaaacgctgaaactggtgcgcgagatgcgcgccgacgtgagcgagctggtagagatgctgcttgctacgccgaatatggaacaacgcactcagggcattggcattctcgaccgacaaatcgcccgtgatttgcgctttgatcacccctacgccgactacggcaatattccaaaaacactgtttacctttaccggcggcgatgttttctcccgcgtgatggtccgtgtcaaagagacgtttgatagcctggcaatgctggaatttgccctcgacaacatgccggataccccactgctgaccgaaggctttagctataaacctcacgcattcgcgctgggctttgttgaagcgccacgcggtgaagacgtgcactggagcatgctcggtgataaccaaaaattgttccgctggcgctgccgtgccgccacctacgccaactggccggtgttgcgttacatgctgcgcggcaataccgtttctgacgcaccgctgattatcggtagccttgatccctgctactcctgtaccgaccgtgtgacgctggtagatgtgcgcaagcgccagagtaaaaccgtgccgtataaagagatcgaacgctacggcattgatcgtaaccgtagcccgctgaagtaaggacagaagatgctgaagttactgaaaactattatgcgcgccggaaccgcgacggtgaaatatcccttcgcgccactggaggtcagccctggctttcgcggaaaaccggacctgatgcccagccaatgtattgcctgcggtgcctgcgcctgtgcttgtccggcaaatgcgctggctatccagaccgacgaccagcaaaatagccgcacctggcagctctatctggggcgttgtatttactgcggacgttgtgaagaagtgtgcccgaccagagccatccagcttaccaataactttgaactgaccgtcaccaataaagccgatctctatacccgcgcgacgttccatctacaacgttgcagccgttgcgaacgcccgtttgccccgcaaaaaaccatcgcactggctgctgaattgttagcacagcaacaaaatgcgccacaaaaccgcgaaatgttgtgggcgcaagcgagcgtctgcccggaatgcaaacaacgcgcgacgctgatcaacgacgatacagatgtactgctggtggctaaggagcagctatgagtccagtgcttacacaacatgtcagccagcccatcacgctggacgagcaaacgcaaaagatgaagcggcatttgctacaggatatccgtcgcagcgcttacgtttatcgcgtcgattgcggcggctgcaacgcctgtgaaatcgaaatttttgctgccattacaccagtattcgacgcagaacgttttggcattaaggttgttagtagtccgcgtcacgccgatattttgttatttactggcgcagtcacccgggcgatgcgtatgcctgcacttcgggcgtatgagtctgcccccgatcataaaatttgtgtttcctacggcgcgtgcggtgtcggcggcggtattttccacgatctctacagcgtctggggcggtagcgacaccattgtccccattgatgtttggatccccggctgcccgccaacaccggccgccaccattcacggtttcgccgtggcgctcggtttgctgcaacagaagattcacgctgtggattatcgcgatcccaccggggtgactatgcaaccgttgtggccgcagatcccgccaagtcagcgtatcgccattgagcgagaagcgcggcggctggcgggctatcgtcaggggcgagaaatttgcgatcggctcctgcgccatttaagcgacgatcctacaggaaatcgggttaacacctggttgcgcgatgccgacgatccacgtctcaatagtatcgttcagcaactctttcgcgtactccgggggttacatgactgaagagtgcggggaaattgttttctggacgctgcgaaaaaagtttgtcgccagtagcgacgagatgccggaacacagctctcaggtaatgtattacagcctagctatcggccatcacgttggcgtgattgattgtctgaatgtcgccttccgctgcccactgacggaatacgaagattggcttgcactggtcgaagaggagcaagcccgacgtaagatgctgggggtgatgacttttggtgagattgttattgacgccagccacaccgccctgttgacccgggcattcgcgccactggcggatgacgcgacgtctgtgtggcaggcgcgtagcattcaattcattcatctgttggatgaaattgtgcaggaaccggccatctatctgatggccagaaaaattgcgtgagaaggatttctcattaataaggactgttgatggctatgagtgacgaggcgatgtttgccccgccacaaggaataacaattgaagcggtaaacggaatgctcgcggagcggttagcacagaaacacggcaaggcgtctttattacgcgccttcatcccgctgccgccgccgttcagcccggtacaacttattgaactgcatgttctcaaaagcaacttctattaccgctaccatgatgatggcagcgatgtgacggcaacaacagagtatcagggcgagatggtcgattatagccgtcacgccgtccttctcggcagtagtggaatggcggagctacgctttattcgcacccacggcagtcgttttacttcccaggattgcacactgtttaactggctggcgcggataatcaccccggttctgcaaagttggctcaatgatgaagaacagcaggtggcgctgcgtttgctggagaaagatcgcgatcatcatcgggtactggttgatattactaatgcagtgctgagtcatcttgatctcgacgatctgatcgctgacgtcgctcgtgagatccatcattttttcggtctggctagtgtcagtatggtactgggcgatcatcgaaagaacgagaagttcagcctgtggtgcagcgatctttctgccagtcattgtgcgtgtctgccacgctgtatgcctggcgaaagtgtattgctgacacaaacgctacaaacccgacaaccgaccttgacgcaccgtgcagatgatctgtttctctggcaacgcgacccgttattactcttacttgcatctaacggctgcgaatctgcgctccttataccgcttacctttggcaaccatacaccgggtgcattgttgctggcgcatacctcttccactctctttagtgaggaaaactgccagctactacaacacatagccgatcgcatcgctattgccgttggcaatgccgatgcctggcgtagcatgaccgatttgcaggaaagtttgcagcaagaaaaccaccagcttagcgagcagctccttagcaatctgggcatcggtgacattatctatcaaagccaggcaatggaagacctgctccagcaggtagatattgtggcgaagagcgacagtacggtgttgatttgtggtgaaaccggaactggcaaagaggtgatcgccagagcgatccatcaacttagcccgcgacgcgacaagccgctggtcaaaatcaactgcgctgccatccccgccagtcttctggaaagtgagttattcggtcatgacaaaggggcgtttactggtgcgattaatacccatcgtggtcgttttgaaattgccgatggcggcacgttgtttctcgatgaaattggcgatctgccgttagaacttcagcctaaactgctgcgcgtattgcaggagcgggagattgagcgtctcggcgggagtagaacgatcccggtgaatgtcagagtcattgccgccaccaaccgtgatttgtggcaaatggttgaagatcgccagtttcgcagcgatctcttttatcgcctgaatgtcttcccactggaattgccgccgctacgcgaccgtccggaagatatccctcttttagcaaaacatttcacgcaaaaaatggcgcgccatatgaatcgcgcaattgacgccatcccgaccgaggcactacgccagttgatgagctgggattggccgggcaacgtgcgcgagctggaaaacgtgattgagcgggcggtactgttgactcgtggtaacagtctgaatttacatctaaatgtccgacaaagccgtttactgccgacgctaaatgaagatagtgcgcttcgcagtagtatggcgcagttactgcacccgacgacgccagagaatgacgaagaagaacgtcagcgcattgttcaggtattgcgagaaaccaatggcattgttgccgggccccgtggcgcagcgacgcgattagggatgaagcgcaccacgctgctgagtcgaatgcagcggctggggatcagcgttcgcgaggtgttgtaatctgcttttgcaggagtatgcatgagaaacaaactctctttcgacttgcagttgagcgccagaaaagcggcaatcgctgaacggattgccgcccataaaattgcccgcagtaaagtgagcgtctttttaatggcgatgtccgctggcgtgtttatggcgatcggatttactttttacctttccgttatcgccgatgccccgtctagtcaggcattaacccatctggtgggcggcctttgctttacactcggctttattttgctggcggtttgcggcaccagcctgttcaccagcagcgtaatgacggtgatggcaaaaagtcggggcgtcattagttggcgaacttggctgattaacgcacttctggtggcctgcggtaatctggcaggtattgcctgtttcagtttgttaatctggttttccgggctggtgatgagtgaaaacgcgatgtggggagtcgcggttttacactgcgccgagggcaaaatgcatcatacatttactgaatctgtcagcctcggcattatgtgcaatctgatggtttgcctggcgctgtggatgagttattgcgggcgtagcttatgcgacaaaatcgtcgccatgattttgcccatcaccctgtttgtcgccagtggctttgagcactgtatcgccaatttgtttgtgattccgttcgccattgccattcgccatttcgcccctccccccttctggcagctggcgcacagtagcgcagacaattttccggcactgacggtcagccattttattaccgccaatctgctcccggtgatgctgggtaatattatcggcggtgcggtgctggtgagtatgtgttatcgggctatttatttacgtcaggaaccctgaaaaatcagcccggcgaaacagttcgtcgggctgaagattattcttgcgcgatttgcccatcgggccaggcatgaatcacggctttgatcagcgtcgccaacggaatggcgaagaatacgccccagaatccccacaaaccaccgaagatcaccacgcttaaaataatcaccagcggatgcaggttaaccgcttcggagaacaacaccggcactaacaggttgccgtccagcgcctgaataatcagatacaccgcgaagcagctccagaattcagtacctgcgccaaactggaatagcgccacgccaaccaccggaatggtcaccacaaatgcgccaatgtacggaataagaacgctgaagccgaccagcactgccagcagcaggctatagttcagcccgaagagcaagaaccccagccaggtggcgatccccaccacgatcatctccagcactttgccgcggatatagttggtgatttgttgattcatctccttccacacctgtcctgccagcccacggttacgcggcagcacccggcgaacggcgttcagcatctgctctttgtctttcagcaggaagaagaccatcaatggcaccagcaccagatagacggctatggtcagcaaaccgaccaggctggcgagggaaattttcaccacgctatcgcccatggtcagcatccgactgcgcatattttcggccattgcatcaataatgcccgcgtccattaacgccggatagcggcgcggcaacgtggcggcaaagtcagaaagcttattgagcatccccggcatatcgcggattaagtagatgccctgttgccaggcgataggcagtaccacgaacgccatcagtagcaatataccgacgaaaaccaccaatacaatgctcgtcgcccagcggcgggagcagccaatagattgcagacgcacggttggccattccagcaaataggccagcacaatagccaccagcaacggagcaagcaggccactaaagaaaaagataatgccaaatccggcaactaaaataaccagcaaggcaatcgcttccgggtcgctaaaacggcggcgataccattgcatcaacatttcgagcataaagaccttccctgaacctcaagagcgggattgcgatccgcaattgtatcgaaatgtcacaaaaaagacttcgctttttatgacggattcaggaaactgaaaagtcatttgagtgggctaatcttcgccgttacactcaaaggcggcgcggtgggaacgatatttcacagtatcggtcaaatgactatctccagaaatacaggatagaggttatgttcaggcagttgaaaaaaaacctggttgcaaccctcattgctgctatgaccattggtcaggtagccccggcgtttgccgacagcgcagacaccttgccggatatgggaacctccgcaggaagcacgctttccattggtcaggaaatgcagatgggcgactattatgtccgccagctacgcggcagcgcgccgttaattaatgacccgctgttaacgcaatatattaatagcctggggatgcgtctggttagccatgccaatagcgttaagacaccgtttcatttttttctgatcaacaacgacgaaattaacgcctttgctttctttggcggcaacgtggtgctgcactctgccctgttccgttattccgataacgaaagtcaactggctagtgttatggcgcacgaaatctcccacgtcacccaacgtcacctggcgcgagcgatggaagatcagcagcgcagcgcgccgctgacctgggtcggcgcgttaggttctattttactggcgatggccagtccgcaggcggggatggcggcgctgaccggtacactggcgggaacgcgtcaggggatgatcagtttcacccagcaaaatgaacaggaagcggaccgcattggtattcaggtgctgcaacgcagcggattcgatccgcaggcgatgccaaccttcctcgaaaaattactcgatcaggcgcgttactccagccgcccgccggaaattttattgactcacccgttgccggaaagtcgtctggcagatgcccgcaaccgtgctaatcagatgcgcccgatggtggtgcagagcagcgaagatttctatctggcgaaagcgcgcacactggggatgtataattccggacgtaaccagctcaccagtgatttgctggatgaatgggcgaaaggaaacgttcgtcagcaacgagcagcacaatatggtcgtgctttacaggcgatggaagccaataaatacgacgaggcgcgtaaaacgctgcaaccgttactggcggcagaacctggcaacgcatggtatctcgatctggctactgatatcgatcttgggcaaaacaaagccaatgaggcgatcaatcgtctgaaaaatgcccgcgatttacgcaccaatccggtgttgcagctcaacctggcgaacgcttatttgcaaggcggtcaaccacaagaagcggccaatattctgaatcgctacacctttaataataaagatgacagcaacggctgggatttgctggcacaggcggaagccgcgctaaataaccgcgatcaggagctggctgcgcgagcagaaggttatgcgctcgccggacgactcgatcaggccattagcctgttgagtagcgccagtagccaggtgaaattaggcagcctgcaacaagcgcgttacgatgcgcgcatcgaccagttgcgccagctgcaggaacgctttaagccttataccaagatgtaattcgcattaaaggaagaacaatgaccaaacaggtaaaaatctaccataacccacgctgtagtaagagccgggaaacgctgaacctgctgaaagaaaacggcgtggagccagaagtggtgctctaccttgagacacccgccgatgcggcaacgctgcgcgatttgctgaaaatactggggatgaatagcgcccgtgaattgatgcgccagaaagaggatctttataaagaactgaacctggctgacagtagccttagcgaagaggcgctgattcaggcaatggtggataatccgaagctgatggagcgcccgattgtggtcgcgaatggcaaagcgcggattggtcgtccaccggagcaggtactggaaatcgtgggttaagatgtgctccatcgctagttgaagcacattgccggatgcgacgcttgccacgtcttatccggcctacgaatactatggattaacttcgcgtagttcggataaggcgttcgcgccgcatccgacaataaacaccttatttacaacttcagaatttctttcacaaacggaatggtcagcttacgttgcgcggtaatgctcgcacgatccaactgatccaacgtcataaatagcgtgcgcatttctctgtcgagccgcttcagcaagaaacgccccacatcttccggcagttcaaaaccacgcaaacgcgcgcgtaactgtagcgcctgcaacttatcttcatcagaaagtggctgcaatttgtagatctgcccccagtcgagtcggctcgcgagatccggtaatcccagattcaactgccgcggtggacgatcgccggtgatcaacaaccgtgttttgccgctttccagaattcgattgtagagatcgaaaatcgccatctcccacaactcatcgcctgcaatacactcaatgttgtcgatacagaccaggctcaaatgctccataccgtcgagcacttccggaacaaaccaggtgcgtttatccagcgggacatagcccaccgcatcgccacgctggctcaattccgcgcaagccgcgtgcagcagatggctgcgccccgcgccttcgcgtgcccagagatagatgtaaccgctatgttcctgacgcagcacgttttgcagcgcggccagtaaagaggagttatcccccggccagaaacttgcaaaggtttcgtcgtcaggaagataaagtggcaaagagagctgtgccggtgtgttcagagatacctcaaccaggatttcacaaaatcggctgaagtttaccacagaatcccatgatgtttgaaccgggcagcaacactgcccggtcggtacattatttgtctgttatatccgcgtcttctgcgtccagcaccacttcttcagggcgcagcacactgatcagtttgaagatcaaacttaagccgataccgacgatggtcgccagcgccataccttttaactccgccgcgccgatgtttaccttcgcgccactgacgccgatgatcaaaatcacggaagtcaggatcaggttctgtgctttgttgtaatccactttgctttcgatcaaaacacgaataccggaagcaccgatgacaccataaagcagcaggctaacgccgcccatcaccggcaatgggatcatctggatagcggcagccagtttaccgacgcaggaaagcaggatagcgaaaatcgccgccccgccgataacccaggtactgtaaacacgggtgatcgccatcacgccaatgttttctccgtaagtagtatttggcgtagagccaaagaagccggaaatcacggtgctcaagccattagcaaacatgctacggtgcagacctggatcgcgcagcagatcttttttgacgatattagccgttactaccaggtgccctacgtgttcggcaataaccactaacgccgctggcagaatagtcagaatggcaaaccactcgaagcgcggcgtatagagggttggcagcgcaaaccagtgagcattaataatcggcgtggtatcgacaattcccattgcgaaagagagcgcgtaccccaccagcacgccaattaaaatcgggataattgccaggaaaccacgaaacagcacggaacctaaaaccgtgaccgccagggtggtaatagagatgatgatggttttggagtctggcgtttgcccttcagccgggagtaaacccgccataccggcagctacgcccgccagctccagaccgatgacggcaacgattgcgcccattgccgcaggtggaaacagcacgtccagccagccggtccccgctttcttcacgataaaagaaaccaggcagaacagcacgccgcacataataaagccgcccagcgcgacttcataccctaacggcaacagtaacaataccggactaataaaggcaaagctggaaccaagataagccggaattttccctttacagatgaagagatacagcagcgttccaataccgttaaataacagtacagtcgccgggttaatatgaaataagacgggcaccaggacggttgcaccaaacatggcgaacaaatgttgcaaactaagcgggattgtctgtaaaagtggcggtctttcactcaccccgatagcacggcgcgtcatagtattatcctctgtattatgtgttataggcgctttactcaaaaaaaagccgactcttaaagtcggctttaattatttttattctttatttcgtaccaaagattttgtcaccggcatcgccgaggcccggaataatgtatccgtgctcgttcagtccctgatcaatgcttgcggtatacagttcgacgtccgggtgcgctttttccagcgcagcgataccttctggcgcagctaccagcaccagaactttgatgctgctgcagcccgcttttttcagcaggtcgatggtcgcgataacggaaccaccggttgccagcattgggtcaacgatcagcgccatacgctcatcgatgttagaaaccagtttctggaagtacggtaccggctccagcgtttcttcattacggtacataccgacaacgctgatgcgcgcgctcggaacgttttccagcacaccgtccatcataccaagacccgcacgcagaattggcacaacggtaattttcttacctttgatctggtcgatttctaccgggccgttccagccttcgatagttactttttccgtttcgaggtcggcggtcgcttcgtaagtcagcaggctacccacttcggaagcgagttcgcgaaagcgcttggtgctgatatcttgctcacgcatcagtcccagcttgtgtttgacgagtgggtgtttgacttccacgatcttcatactctttctcctttgaggggcagccacaaaaaaaatcgacggattatacctcctttcttcaaggcggcaatattcttttcgttgactttagtcaaaatgataacggtttgagataaagttattttatattcagatggttatgaaagaagattattccatccgaaaactaacctttaccctggcacaagtcttctttcgccgcgcgcctggggaaaagacgtgcaaaaaggttgtgtaaagcagtctcgcaaacgtttgctttccctgttagaattgcgccgaattttatttttctaccgcaagtaacgcgtggggacccaagcagtgaccgataaaacctctcttagctacaaagatgccggtgttgatattgacgcgggtaatgctctggttggaagaatcaaaggcgtagtgaagaaaacgcgtcgtccggaagtgatgggcggtctgggcggcttcggtgcgctgtgtgcattgccgcaaaaatatcgtgaacccgtgctggtttctggcactgacggcgtaggtaccaagctgcgtctggcaatggacttaaaacgtcacgacaccattggtattgatctggtcgccatgtgcgttaatgacctggtggtgcaaggtgcagagccgctgtttttcctcgactattacgcaaccggaaaactggatgttgataccgctagtgcggtgatcagcggcattgcggaaggttgtctgcaaagtggctgtagtctggtgggtggcgaaacggcagaaatgccggggatgtatcacggtgaggattacgatgtcgcgggtttctgcgttggcgtggtagaaaaaagtgaaatcatcgacggctctaaagtcagcgacggcgatgtgctgattgcactcggttccagcggtccacacagcaacggctatagcctggtgcgcaaaattcttgaagtcagcggttgtgatccgcaaaccaccgaacttgatggtaagccattagccgatcatctgctggcaccgacccgcatttacgtgaagagtgtgctggagttgattgaaaaggtcgatgtgcatgccattgcgcacctgaccggcggcggcttctgggaaaacattccgcgcgtattgccagataatactcaggcagtgattgatgaatcttcctggcagtggccggaagtgttcaactggctgcaaacggcaggtaacgttgagcaccatgaaatgtatcgcaccttcaactgcggcgtcgggatgattattgccctgcctgctccggaagtggacaaagccctcgccctgctcaatgccaacggtgaaaacgcgtggaaaatcggtatcatcaaagcctctgattccgaacaacgcgtggttatcgaataatgaatattgtggtgcttatttccggcaacggaagtaatttacaggcaattattgacgcctgtaaaaccaacaaaattaaaggcaccgtacgggcagttttcagcaataaggccgacgcgttcggccttgaacgcgcccgccaggcgggtattgcaacgcatacgctcatcgccagcgcgtttgacagtcgtgaagcctatgaccgggagttgattcatgaaatcgacatgtacgcacccgatgtggtcgtgctggctggttttatgcgcattctcagcccggcgtttgtctcccactatgccgggcgtttgctgaacattcacccttctctgctgccgaaatatcccggattacacacccatcgtcaggcgctggaaaatggcgatgaagagcacggtacaagcgtgcatttcgtcaccgatgaactggacggtggcccggttattttacaggcgaaagtcccggtatttgctggtgatagcgaagatgacatcaccgcccgcgtgcaaacccaggaacacgccatttatccactggtgattagctggtttgccgatggtcgtctgaaaatgcacgaaaacgccgcgtggctggatggtcaacgtctgccgccgcagggctacgctgccgacgagtaatacccccgtaattaaagcgccagctctgccgctggcgtttttcaattcacctgtaaatcgcaagctccagcagtttttttcccccttttctggcatagttggacatctgccaatattgctcgccataatatccaggcagtgtcccgtgaataaaacggagtaaaagtggtaatgggtcaggaaaagctatacatcgaaaaagagctcagttggttaagcttcaatgaacgcgtgcttcaggaagcggcggacaaatctaacccgctgattgaaaggatgcgtttcctggggatctattccaataaccttgatgagttctataaagtccgcttcgctgaactgaagcgacgcatcattattagcgaagaacaaggctccaactctcattcccgccatttactgggcaaaattcagtcccgggtgctgaaagccgatcaggaattcgacggcctctacaacgagctattgctggagatggcgcgcaaccagatcttcctgattaatgaacgccagctctccgtcaatcaacaaaactggctgcgtcattattttaagcagtatctgcgtcagcacattacgccgattttaatcaatcctgacactgacttagtgcagttcctgaaagatgattacacctatctggcggtggaaattatccgtggcgataccatccgttacgcgctgctggagatcccaagtgataaagtgccgcgctttgtgaatttaccgccagaagcgccgcgtcgacgcaagccgatgattcttctggataacattctgcgttactgccttgatgatattttcaaaggcttctttgattatgacgcgctgaatgcctatagtatgaagatgacccgcgatgccgaatacgatttagtgcatgagatggaagccagcctgatggagttgatgtcttccagtctcaagcagcgtttaactgctgagccggtgcgttttgtttatcagcgcgatatgcccaatgcgctggttgaagtgttacgcgaaaaactgactatttcccgctacgactccatcgtccccggcggtcgttatcataattttaaagactttattaatttccccaatgtcggcaaagccaatctggtgaacaaaccactgccgcgtttacgccatatttggtttgataaagcccagttccgcaatggttttgatgccattcgcgaacgcgatgtgttgctctattatccttatcacacctttgagcatgtgctggaactgctgcgtcaggctagcttcgacccgagcgtactggcgattaaaattaacatttaccgcgtggcgaaagatagtcgcatcatcgacagcatgatccacgccgcacataacggtaagaaagtcaccgtggtggttgagttacaggcgcgtttcgacgaagaagccaacattcactgggcgaagcgcctgaccgaagcaggcgtgcacgttatcttctctgcgccggggctgaaaattcacgccaaactgttcctgattagtcgtaaagaaaacggtgaagtggtgcgttatgcacacatcgggaccgggaactttaacgaaaaaaccgcgcgtctttatactgactatagcttgctgaccgccgatgcgcgcatcaccaacgaagtacggcgggtatttaactttattgaaaacccataccgtccggtgacatttgattatttaatggtaagcccgcaaaactcccgccgcctattgtatgaaatggtggaccgcgagatcgccaacgcgcagcaagggctgcccagtggtatcaccctgaagctaaataaccttgtcgataaaggcctggttgatcgtctgtatgcggcctccagctccggcgtaccggttaatctgctggttcgcggaatgtgtagcctgatccccaatctggaaggcattagcgacaacattcgtgccatcagtattgttgaccgttaccttgaacatgaccgggtttatatttttgaaaatggcggcgataaaaaggtctacctttcttccgccgactggatgacgcgcaatattgattatcgtattgaagtggcgacgccgctgctcgatccgcgcctgaagcagcgggtactggacatcatcgacatattgttcagcgatacggtcaaagcacgttatatcgataaagaactcagtaatcgctacgttccccgcggcaatcgccgcaaagtacgggcgcagttggcgatttatgactacatcaaaagtctcgaacaacctgaataaccctatgccaatacacgataaatcccctcgtccgcaggagtttgctgcggtcgatcttggtagtaacagttttcacatggtcatagcccgtgtggtagatggtgccatgcagattattggccgcctgaaacagcgggtgcatctggcggacggcctggggccagataatatgttgagtgaagaggcaatgacgcgcggtttaaactgtctgagcctgtttgccgaacggctacaagggttttctcctgccagcgtctgtatagttggtacccatacgctgcgtcaggcgctgaacgccactgactttctgaaacgcgcggaaaaggtcattccctacccgattgaaattatttccggtaatgaagaagcccgtctgatttttatgggcgtggaacatacccaaccggaaaaaggtcgcaaactggttattgatattggcggcggatctacggaactggtgattggtgaaaatttcgaacctattctcgttgaaagccgccggatgggttgtgtcagctttgcccagctttattttcctggcggggtcatcaataaagagaattttcagcgcgctcgcatggcggcagcacaaaaactggaaactttaacctggcaattccgtattcagggctggaacgttgcaatgggcgcttccggtaccataaaagccgcccatgaagtgttaatggaaatgggcgagaaagacgggataattaccccggaacgtctggaaaaactggtaaaagaagttttacgtcaccgtaatttcgcaagcctgagtttaccgggtctttccgaagagcggaaaacagtcttcgttccgggactggcgattttatgcggtgtgtttgatgctttagccatccgtgaactgcgcctttctgacggggcgttacgcgaaggcgtactgtatgaaatggaaggacgtttccgtcatcaggatgtgcgtagtcgcaccgccagcagcctcgccaaccagtatcacatcgacagcgaacaggcccgacgggtgctggataccactatgcaaatgtacgaacagtggcgggaacagcaaccgaagctggcgcatccgcaactggaggcgctactgcgatgggccgccatgctgcatgaggtcgggttgaatatcaaccacagcggtttgcatcgccactccgcttatattctgcaaaacagtgacttgccgggttttaatcaggaacagcagctgatgatggcgacactggtgcgctatcaccgtaaagcgattaagctcgacgatctaccgcgctttaccttgtttaagaagaaacagttcctgccactgatacagctattgcgccttggcgtattactcaacaatcaacgtcaggcaaccaccacaccgccaacattgacgctgattactgatgacagtcactggacactgcgtttcccgcatgactggtttagtcagaatgcgctggtactgcttgatctggaaaaggagcaagaatactgggaaggcgtggctggctggcggttgaaaattgaagaagaaagtacaccagaaatcgccgcttaatactttgcgggccgacgagaaatgtcggcccgcattattcaggcactttcgcgaatgggttcgatttcattcagcgtatcaattaacggctgcggcttaccaataagataaccctgcatataatcgatccccaaagagagcaccgcctcgcggatctcttcgttttcaacgtactctgccactaccagcattttcttcattcgcgccaggtggcaaatgcttgccactatctgataatccagactattactcacaatattgcggataaaactgccgtcaattttaagcagatcggcattcacatttttaagccgcgcatagctggcgtagccggtgccgaaatcatcaatcgcaatctggcagcctaattcctgaagatgctgcaaggtgatttgcgcctgcttaacattggtcagagcattactttcggtgacttcaaaaataagttgccacgcttcaatctgatatttagccagcaactgactgacttcaacaggaaaacgagcctgacatacgctggttggagacagattaatagcaaaacggtgagcgggcatcttcgctctgttttcagccataaattgcagcgtatgctcaatgacccacatgtcgatactgctgcttaaaccaaattcgtgcgcgaccggcaagaagctatcggggctgatcagttcatcattctcacctttcatgcgcagaagaatttcatggtaaacatcaccacgcataccggtaatcggctgggccatcaggaaaaaatggttgtgttccagcgcctgctgtagtcgattcatcatcgcgactttatctttcaattcgcgttgcaaatacattgccccgcgacgctgcatattttccggggcgttggtcacgatggaaagttcggcgaccgtatttagctctcccagcagcaggtagatatgattcactgggctgcgcacatagcagtaactgacgccaatctgcggttgcatcggcatgccatcccaaaagaaacgaaattgcttgagatggctatccagtgcggtaatgcgctcctggtggctttctgtattcagtcgcagcgcgagatcgttaccgctaagctgataaacatcttcacccggttccagcaagggactcagccagtgagaaagtttttgcttgtattgaatccgcagcatgatgccatagttcttaaccagcatttccatgccagggatgcgtaaataacaaagcgcagaccagggggcatcacgcaacgcgcgattcagggcgcgaacatttggcagatgaaccaccgggtccacatacgcaagccgctgaatgcgtctgactaccgctctctgacgggttgccagtacagccatataattgacaataaaagagaataccagataactggaggaggttatggtcagctgcgtggtatagccaggataaatgggaatgtaattttgatagctgtggatgctgatcatcaacacgaccgcccagagcaggctaatcagcttataaccatagcgcatcgctccccacatcatcaggggcagcaataaactcaaggtataattggtgctaaaaattgtgcttttttcatttaacggcatgcataacagcaacaataaagcacctaatgccagtagccagagcgcgaactcttttttggtgactttggcatcaacctgctgttttaattggctataatagctacgtaaataaaatggatttcgcactacccgaatgatgaagtagcacagcgggacaccgatcagattacccaccagtaaggcctgataattgattaaagtcccgaggttaaaaggcatgacaccgaccagattttctctgctcgccagtaatcctacaaatgcagcaaactggaaaagtatcagaaacagcgttgcaggaaacacaatctgccagaatatacgctgggaaattaaacgggtatcaccatgactaacgttgttacgccggggagtaaagaccctgtaaccgccccaacagagaatgataatgataataaaattagccgttaaacttagcgtttcgtaaaaacccagctctgcatatttgcggacaaaaatccctaaggcgatccctggcaatgccgcccagctgaaaaacatcatcatgctgatcatcagtgccagaggcagataaaagagaaaaacctcaccggaagaaatatgcgcgaaagtattaatgtgggcgaaaatgggcaagattaaagaaggcaggaacagcggaagcccccaccatttatcacgtatttttatataagttgcattcagtttcatagatgctcagcagaatcccccacatcctgaaggaggtgtattcagacaggcatcccacctgacttcgaatgatgattattcatcactatagagagcattgattctaagtgtcatatgaaagtaccaattgatatatatcaaacaaaataaccctgattaatgaattattacgtttatcatgttaattcatcattattacatcatcattgtaaataattaaattaacttccataacattaaaatatgtatccactgacgcttttttacataacgaagaattgaccattttgtcctgttgtgccttaatgtaagtaccgtccacagcgtgggacatacttcaaggaaccttttgtgagtcaggcaaccagtatgcgaaaacgacaccgatttaacagtcgcatgacccgtatcgtactgctcatcagctttatcttcttctttggccgttttatctacagctccgtcggtgcctggcagcaccatcagagcaaaaaagaagctcagcaatccacactctccgtcgaaagtccggtacaacgttaacggttaccttctccactttcacagaacataacggcacttcgctgtcggatgcttttgctgtttgggattatcaaagcggcagatattctttcatcttaaattttacgtctttatcctgactgatgtttatcctgtttggctgcgaaataaatataaaattaatatatatgttgtaatgatatatttttataaattattccctgcgtgaattttaataaatttaatctatccctttatacgcaatacatttactttcctcttttgatgatcttaaatgtcttatttttcgtaatgtgtataacaaggaatagtgatgaaatttaaaaaatgtcttctgcctgtggcaatgttagcgagtttcactctggcaggatgccagagtaatgctgacgatcatgctgccgatgtttatcaaaccgatcaactgaataccaaacaagaaactaaaaccgttaatattatttccattcttcccgcaaaagttgccgtagacaactcccaaaataaacggaacgcacaagccttcggcgcgcttattggcgcagtcgctggcggtgttatcggccacaacgtcgggtctggcagcaattccggaacgacggcaggtgcagttggcggcggagctgtaggcgcggcagcgggttctatggtgaatgataaaaccttagtggaaggtgtttctttaacctataaggaaggcaccaaagtgtatacctctacccaggtgggtaaagagtgccagtttacgacaggtttagccgttgttattaccacgacgtataacgaaacgcgtattcagccaaataccaaatgtcctgaaaagagctaataatcaggaggagtcatgaagaaagtttttctttgcgccatcttagcctccttaagctatccggctatcgccagtagtttgcaggatcaactctctgctgtcgcagaagcggaacagcaaggtaaaaatgaagagcaaaggcagcatgacgaatgggtcgcggagcgcaacagggaaatccagcaagagaagcaacgtcgcgcaaatgcccaggccgccgctaacaaaagagcggcaacggcagcggcaaataagaaagctcgtcaggataaactggacgccgaagcctctgcggacaaaaaacgcgatcaaagttatgaagatgagctacgcagcttagagattcagaaacaaaaactggcgctggcgaaagaagaagcccgcgttaagcgagaaaacgaatttatcgatcaggaactgaagcacaaagctgcgcaaaccgatgtggtgcaatctgaagctgacgccaacagaaatatgactgaaggcggtcgcgatctgatgaaaagcgtgggcaaagcagaagagaacaaaagcgacagctggtttaattaatcgatgttagtaacttcaatcctataattcttgaagataaaaaaccctctgtagtaacagagggttttgttcattcatagtgcagggtcaaatcattcccactcaatggtagctggcggcttgccgctgatgtcatacaccacgcgggaaataccgttcacttcattgataatgcggttggaaacgcgaccgaggaaatcgtacggcagatgcgcccagtgtgcggtcataaagtcgatggtttcgacagcacgcagagagacaacccagtcatacttacgaccatcgcccattacgccaacggaacgtaccggcaggaacacagtgaacgcctggctgactttgtcgtacaggtccgctttacgcagttcttcaatgaagatggcgtcagcacggcgcagcaggtcacagtactctttcttcacttcacccagaacacgaacgccaaggcctggtcccgggaacgggtgacggtacagcatgtcgtacggcaggcccagctccagaccaatcttacgcacttcgtctttgaacagctctttcagcggttcaaccaggcccatcttcatctctttcggcaggccgcccacgttgtggtgagatttgatgacgtgtgctttaccggttgcagacgccgcagattcgataacgtcagggtagatggtgccctgcgccagccacttcacgtcttccagtttcagcgcttcttcatcgaatacttcaacgaaaacgcgaccgatgattttacgttttgcttccggatcgttttcgccagccagcgcactcaggaagcgatcttctgccggtacgtgaacaatgttaagaccaaagtgatcgccaaacatatccagaacctgctctgcttcgttgaggcgcagcaggccgttgtcgacgaatacgcaagtcaggtttttaccgatagcgcggtgcagcagcattgcggttacggaggaatccacaccaccagagaggccgaggatgactttatcgtcgcctacctgctcgcggatgcgagctacagcatcgtcgataattttcgctggcgtccacagggcttcacactggcagatatcacgcacaaaacgctccagcatgcgcataccctggcgggtatgagtcacttccgggtggaactgtacgccatagaagcgtttttcttcgttagccataatggcaaacgggcagctttcggtgctggctacggtgatgaagtcggacggaatagcggtaactttatcgccgtggctcatccagacatcgagcagcggtttaccgtctgcggtcagcgcatcttcgataccgcgaaccagtgcgctgtcgtttacgacttcaacctgcgcgtagccaaattcacgttcgttagaggcttcaacgtgaccgcccaactgcattgccatggtctgcatgccatagcaaacgccgaataccggtacgcctgcttcaaagacatactgcggcgcacgcggactgttttcttcagtagtactttccgggccgccggaaagaataatgccgcttggattgaagtcacgaatttgtgcttctgtcacatcccacgcccacagttcgcagtaaacacccagctcacgcacgcggcgcgcaaccagttgagtgtactgagaaccgaagtccagaatgaggatgcgatgcttatgaatgttttccgtcattgacgcttattccgaggcaagtgaaacagataatataaatcgcccgacatgaagtcgggcgaagagaatcaggagcccagacggtagttcggggactctttagtaatggtcacgtcgtgaacgtggctttcctgaatgcccgcaccgctgatacgtacaaactccgctttagtacgcagttcgtcgatagtaccacagccggtcagacccatacaggagcgcaggccgcccatctgctggtgaatgatctctttcaggcgacctttataggctacgcgaccttcgataccttccggcaccagtttgtcggcagcgttatcgctctggaaataacggtcagaggaacctttggacatcgcgcccagggaacccataccacggtaagatttgtaagaacggccctggtagagttcgatttcacccggagattcttcagtacccgccagcatggaacctaccatcaccgcgcttgcgccagcggcgatagctttggcgatgtcgccggagaagcgaataccgccatcagcgataaccggaataccggtgccttccagggcttctactgcgtcagcaacagcggtaatctgcggaacaccgacgccagtcacgatacgagttgtacagatagagccagggccaatgccgactttaaccgcactgcaaccagcttctgccagagcgcgtgcacctgcagctgttgccacgttgccgccgataatttgcagatccggatatttagcacgggtttcacggatacgttgcagtacaccttcactgtgaccgtgggaggagtcgatcagcagaacgtcaacgcctgcggcaaccagcgcgtcaacacgctcttcgttacccgcacctgcgccaaccgctgcaccaacacgcagacggccttgctcgtctttacaggcgttcggtttacgttccgctttctggaagtctttcacggtgatcatgccgatcaggtggaattcgtcatcaaccaccagcgctttttcaacgcgtttttcgtgcatttttgccagcaccacttcacgggcttcaccttcacgcacggtgaccagacgctctttcggcgtcatgtaaacgctaaccggctggttcaggtcggtaacaaaacgcacgtcacgaccggtgataatacccaccagttcgttttcttcggtaacgaccggatagcccgcaaaaccgttacgctcggtcagttctttcacttcgcgcagcgtcgtggttggcagaacagtctgcggatcagtcaccacaccagattcgtgttttttcacacggcgaacttcttctgcctggcgttcaatggacatgtttttgtggataaagccgataccgccttcctgagccagagcaatagccaggcgcgcttccgttacggtatccattgctgcggaaagcatagggatattcagacgaatagttttcgtcagctgggtgctgaggtcagcagtattcggcagaacggtagagtgagcaggaacgaggagaacgtcgtcaaacgtcagagcttctttagcgatacgtagcatgggcaatatctcgaccagagtggttaataaatattgccgcggcattatacagagcgtaaccgattgcatctacccctttttgcaaaaaatgcttgctatccccgaagggcgggttactatcgactgaataacctgctgatttagaatttgatctcgctcacatgttaccttctcaatcccctgcaatttttaccgttagtcgcctgaatcaaacggttcgtctgctgcttgagcatgagatgggacaggtttggatcagcggcgaaatttctaatttcacgcaaccagcttccggtcactggtactttacactcaaagacgacaccgcccaggtacgctgcgcgatgttccgcaacagcaaccgccgggtgaccttccgcccacagcatgggcaacaagttttagttcgcgccaatattacgctctacgagccgcgcggcgactaccagataatcgttgagagtatgcagccggccggtgaagggctgctgcaacagaagtacgaacagctcaaagcgaagttgcaggctgaaggtttgttcgatcagcaatacaaaaaaccacttccctcccctgcgcattgcgttggtgtgatcaccagtaaaaccggtgctgcgctacatgatattttgcatgtgttaaaacgtcgcgatccttctctgccggtgatcatctaccctgccgccgttcagggcgatgacgcgccggggcaaattgttcgcgccattgaactggcgaatcagcgcaatgagtgcgacgtattgatcgtcgggcgcggcggcggtagcctggaagatttatggagttttaacgacgaacgcgtagcgcgggcgatttttaccagccgcattccggttgtcagcgccgtcgggcatgagacggatgtgaccattgccgattttgttgccgatctgcgtgcgccaacgccgtctgccgccgctgaagtagtgagccgtaatcagcaagagttactgcgccaggtgcaaagcacccgtcaacggctggagatggcgatggattattatctcgccaaccgcacacgtcgctttacgcaaattcatcaccgattacagcaacagcatccgcagctccggctggcacgccagcaaaccatgcttgagcgcctgcaaaagcgaatgagctttgcgctggaaaatcaacttaagcgtaccgggcaacagcagcagcggttaacacagcggctgaatcagcaaaatccacagccgaagattcatcgcgcgcaaacgcgcattcagcaactggaatatcgtttagcagaaaccctgcgcgcacagcttagcgccacgcgtgaacgtttcggtaatgcagtaacgcacctcgaagccgtaagcccactgagtacgctggcgcgtggatacagcgttactactgctactgacggcaatgtactgaaaaaagtgaagcaagttaaagcgggtgaaatgctaaccacacgtctggaagacggctggatagaaagtgaagtaaaaaacatccagccagtaaaaaaaagccgtaaaaaggtgcattaagccagcacgaattcaacgcgttttttgcttatcaagccatgcccgtgctgacagaagtaatctactgcaccacaggcttttaacacctgcaacggttgatggcagtctggacaaagagctttcatttcaataaattccccgcaggatcggcaacgcgcatggccgttatcctgatcaagcacatgctgacattgtggacaatgcagttccatatgaattcctccggtagccattccctctacattcatagagggaatggcagataaaatacttacggataattatttatttttcttgatgtgcttcatcagacgcttacgtttacgcatctgggttggcgtcagggtgttacgcttattcgcatacgggttttccccttctttgaactgaatacgaatcgggcttcccattacgtccaggcttttgcggaagtagttcatcaagtagcgcttgtaggaatcaggcaggtctttcacctgattaccgtgaatcaccacaatcggcgggttataaccaccggcgtgggcatatttcagcttcacacgacgaccgcgtaccagcggcggttggtgatcttcaacagccatcgtcatgatgcgcgtcagcatagaggtccccacacgacgggtggagctgtcatacgcttcacgtacactttcaaacaagttaccaacaccactgccgtgcaaggcagagataaagtgcacacgagcaaaatcgataaagcccagacggaagtccagcgtttctttcacctgctctttcacttcctgactcaggccatcccacttattcaccacaatgacaagactgcgcccactattgagaataaagcccagcaggctgagatcctgatcggaaataccttcgcgcgcatcaatcactaacatcaccacgttggcgtcttcaatggcctgcaacgttttgattacggagaatttctctacagcatcggtgattttgccgcgtttacgtacgccagcggtgtcaatgagcacatactcacgtccatcgcgttccattgggatgtagatgctgtcacgcgtcgtgccaggcatgtcgtaaacaacaacgcgctcttcaccaagaatacggttagtgagtgtagacttacctacgttcggacgacccacaatcgccagtttgatcggcagactttgcgggtcgaagtcgtcttcctcttcttcttcgccgttctcttccgcttcaaattgcgcccagtattcagcgtcttcgtcgacttcctcttgcggtgcgagatcttccatccacggcagcagcacatgctccagcagacttaatacgccacgaccgtgagacgcggcgatcgggtagatttcacctaaaccaaggctgtagaaatcaaccactgcctgatcgggatccagaccgtcagttttgtttgccaccaggaaggtcggtttttcacgggagcgcagatgtttggcaatcgcttcatctgccggcatcaggcccgcgcgcgcatccaccataaacagtacgacgtccgcttcttcaatcgccagcaggctttgttccgccatgcgggtttctacaccgtcttctgtgccatcaatcccgccggtatcaatacagataaactcacggccttcaatttccgcacgaccgtacttacggtcacgagtcagacccgggaaatccgcaaccagcgcatctcgggtgcgagttagacggttaaataacgtggattttcctacgttagggcgcccgacaagcgcgaccacaggtaccatgtttaaagcctcatttttataaatcatcagacaacgcacgctatattcgcgtcgttgttaaaaacaggaaaacggcccctgtccaggagccgttttcaaagtgaacgacagagacgattaacgtgtaatagagtacacggttccgtcttttgcctggatcagcagtttgccgtcagcggcaaccggttcagtctggaaaccggaactatcaactttttgctgggcaacgaaacgaccatcttcgacgttaatccagtgcagataaccttcactgtcaccgaccaccaggttgccattatacagcaccggagaagtcagcaggcgatgcagcagatcgctttgtgtccacagcgtaacgccgccatcaatggtcaacgccatcacccggtcattttgatcgaccagatagatgcgattgccgtcgacgatgaaatcattcacgctacccagttcgcgtttccacataatctgaccactgcgcagatcaagcgccgtcaggttaccattataggccagcgcgaaaacaacgccgttaacaacgacgggagtcgtgtcaacatcgctcagacggtcaatttcggtagaaccggtcgcctgggaaatacgctgctgccaaatcatctggccctgttccatcagcactgcgctgacgcgaccattatcgccccccacgacggccgcaccaaaagccgttgtcggcgcagactcgccacgcaaagagaggctaggcatatcgaggttaactgtccatttgacagcgccgtcagcttcgttcagcgcttgtaactgaccgttactggtgtggattaacaccagaccgtcgctgaccaccgggcggctaagtgcttcacccgcgactttagtttgccatgccacagtaccatcgctggtattcagcgcgtaaacctgcgccttttcgctgccaatgtagacatgcccaccagacacggtcacaccgccagaaagtaatgcaggctctttagagaaccagccatctttctcggccaggctgacagaccagatttctttgccatcatccgcattcagcgcttttactaaaccagcgcggtccgctgcatagacaacgttgtccgccagtgccggatgaagattggaatagaagttgccaatgccgctaccaacggaagtgctccacgccgtggtcggcgtaaactggttttcaacggttggcaatggggacatctttaccacatcttcttcgctgttaaacaggctacagccgcttaaaagggtaacggaaagcagtcctggcagcagtaatttacgcaattgcatcgggtccctctcagatggacaaattattaattttcatctgcatcatttcgctcagtgccggagtaacatcgcttttcacgcctgcttcccatgcactacgcgcaccttgcttatcacctttgctcagcaatgcttcaccacgcaggtcggcaacaatggcagcccacccttcacctttgatggtatcaagggttttcagcgcggcatcagcctgcttgagctgtacctgaacgcgagcaagacgcagatttatcacggctttgagattttcatcgctcgtgtctgccagcccctgttgtaactgggcggcagctttctctagttcatttttgtcaacaaattgctgcgcaagttccaaagaagccagcgcaccataagtatttttattttcagcagcaaatttttccgccgccgggatgctatccggtttgccttcgctcactgcggtaaccgcattttgataggcaagagaagcggagcgtgcagaatcaacctgatggctgttccagtagcgccagccaatcagtgcgccaacgcccaaaatcaccccaacagccagtgctttgccattttcagcaaaaaagcgtttaaccgcttctacctggtcgttttcgttctcgtaaatttccacgctgtccttctccttccttaacccagtaacgtgcgcaaatgcgcggctacgctatcctgcgcaactgccgtttgctcaccagagcgcaaatccttcactactgctgtgccgttagccacttcagactcacccagcaccacagcaacgcgggcaccccatttatcagcacgggcaaactgtttcttaaagttgccgccgccgtggttggtcatcaatttcacgcccggtaattcatcacgcagacgctcagctaatgccatagccgcagattgtgtatcagcaccactagccaccaggtatatatcgacaacaggatcggctttaaattccggattaacggcctgtactaacaatacaagacgttcgaggcccatagcaaaaccgacagccggtgttgcacgaccgcccagttgttccacaagaccgtcataacgaccgcctgcacacacggtgccctgggagccgagactgttagtcacccactcgaaaacggtacggttgtagtaatccagaccacgcaccagacgctggtttacggtgtaagcgatccccgcgctctccagcagtttgcacagaccggcaaaatgctcacgagattcctcgtccagatagtcacctaatgccggagcgtcgttgagaagcgcctgcacttccggatttttactatccagcacgcgcagcgggttagtgtacatgcggcgtttgcagtcttcgtccagcttttctttatgctgctcaaggaatgccaccagcgcatcgcggtaattggcgcgtgcttccaggctaccgatagagttcagctcaagagttacgtgctcggaaatacccagcgcgcgccaccagcgggcagtgagcataatcagttcagcgtcgatatccggaccttgcagaccgaaaacttcgcagcccaactgatggaactgacgataacgccctttctgcggacgctcgtgacggaacatcggcccgatataccacagacgctgttcctgattgtacagaagaccatgctcgatgccggcgcgtacacagcccgccgtcccttcagggcgcagagtcaggctgtcgccattgcgatcctcaaaggtgtacatctctttttcaaccacgtcggtgacttcaccaatcgcacgtttgaatagcggggtctgctctacaatcggcaagcggatttcactgtaaccgtagctgccgagcacgtttttcagtgtgccttcaatgcgctgccagatggccgtttcgccaggcaggtaatcgttcatgccgcgaatggcttgaatgttttttgccacgtttattctctttctgaatataaaaatgaaccctcaacgcttccctcaatgtttcgggagccatgcgggttcaatcatacacgggaagcgaggcgcttcccatcacgttattatttttcaacctgctgaacgtcaattcgacgcgcttcgtccagctgactggctttcgcacgaatgcgtgcttccagctggtcgatcatatcgttgttgtccagacggtctttgcgcacgccatcttcatagaggccgcttttcttgttgccgccggtgacgccgagtgtagaaaccagcgcctcacctgggccattcaccacgcagccgataatgctaacgtccatcggagtgatgatatcttccaggcgttgctccagcgcgttaaccgtaccgataacatcaaattcctgacggctacaggtcgggcaggcgatgaagttgatccctcggctacggatacgcaggcttttcaaaatatcgaaaccgactttgatctcttcgaccggatcggccgccaggcttacgcgcagcgtgtcgccgatgccttcagacagcagcagacctaaaccaatggcggattttactgccccgctgcgcgcaccaccggcttcggtgatccccagatgcaacggctgatcgatctgttttgccagcaaacgataagactcaacagcgaggaagacgtcagacgctttcacgctgactttgaactgatcgaagttcaggcgatcgagatgatcaacatgacgcatggcagattccagcaacgcctgcggcgtcggttcgccatacttttcttgcagatctttttccaggcttccggcgttaacgccaatacggatcggaatgtttttatcgcgcgcacagtcaaccaccatgcgaatacgctcttcattaccgatattgccagggttaatacgcagacaatcgacgccgtattccgctactttcagcgcaatgcgatagtcgaagtggatgtcagccaccagcggcacgttaacctgctgtttgatgagtttgaacgcttctgccgcgtccatcgtcggtacggatacacggacgatatcagcgccaacgcgttccagcgccttgatttgattgaccgttgcttcgacgtctgtcgtacgcgtattggtcatggactgtacggcgatgggagcaccatcgccaatcggcacattcccaacgtaaatacgtgtactttttctacgttgaattggagcctggttatgcatgaaaaatctcccgcgttacccgtctgttactgcgccggactttgttcggcattgagggtcagacgcgcaacctggttagttctgataaaacgactcagatcgacaggtttcccttgatactggatctgtactgcggctggcgcaccaattttcagtttgtacggtgcctggccggttaagttcaaattaccgtctttacgctgcataccgctaaacaattttttaccggtagcatcagtgacctccagccagcaatcggcagtaaagttcatcaccagcgcattcggatcagccaccggcgtggtcacgccagcctgatcggttggcaacggcgcagcaccatctggcgttgttgctgccgttggtgccggggtcgcggcggtatcaacatttgcctggctagggctaacaaccgcattctgttgcggatcaacagctggtgctggcgcagttacggcaggtgtttgcgtgttggttgcggtagtatccacagacgctggcggcgtggacgttgtagccgggtctgtagttgtgctcgtatttaatggaacactctgcccctgctcgctattactgctcagttccgcgctagattgatcggccatagtggtgatctcttcctgctgagctttgcggtcttgccaccaccaggcaccgctcaggccgataaccacaaacaacaccagccaagtgaaggtcatcagccagccgtcgcgttttttgcggcgtttaccgagggaaaaactctgcatcggcgcaacttttgcagcccgaagtggagcctgcttttccagccctggcagcagttcttcttctggaatatgtaccagacgcgcataagagcggatatatccgcgcaggaatgtactagcaagatcggcgggtgccttatcttcttcaatgtcgcgtaccgtggaaaccttcaggcaaagtcgctcggcaacggcctgctgactaagtcctagttgttcgcgagcattacgcaggcgagcgccggtagtaagtgcttcattttggtcgtgcgtggcttcagtattcattcgctgcaggtacgtttaaatgagaattgagatgccggtgaaccatcatgctcacccacaccgcgaaacatccgttaagttaaccgttatcatacagtataagaccgtctgtgtgctcgtgacaaagcccacattcactaaggctaacttactgttgcatcgttacatactgccttaaagtcagcaaaaacgcaccgttaatattgaccagacaattgcaacttaatacttcattcataaaacattacgccacggtacataaagtaaccgtggcgtaatggctatcagaccgctttaatgtcgatggcttcaccctgcatccgtttacgcagggtacgtttcgtacggtcgataacatcgcccgccaactgaccacaggcagcatcgatatcatcaccacgagttttacgcacaatagtggtgaaaccgtagctcatcagcactttactgaaacggtcgatacggctgttgctgctgcgtccatacggcgcacccgggaacgggttccacgggatcaggttgatcttacacggcgtatctttcagcagttccgccagttggtgcgcgtgttcagtgccgtcgttaacgtggtcaagcatcacgtattcaatagtgactcggccctgattggcgttggatttctccagataacggcgcaccgcagcaaggaacgtttcgatattgtactttttgttgatcggcacaatttcgtcacgaatttcgtcgttcggcgcgtgcagggaaattgccagtgcaacgtcgatcatatcgcccagtttatccagcgccggaactacaccggaagtggaaagcgtgacgcgacgtttagacaggccaaaaccgaaatcatcaagcatgatttccatcgccggaacgacgttgttcaggttgagcagcggctcgcccatgcccatcatcactacgttagtgatcggacgctgaccggtgacttttgctgcgccgacgattttcgccgcacgccacacctggccgataatttcgctcacccgcaggttgcggttaaagccctgctgggcggtggaacagaatttacactccagcgcacaccccacctggctagagacgcagagcgtggcacggtcgtcttccgggatatacaccgtttcgacgcgctgatcgccaacggcgatcgcccatttaatggtgccgtcagaactacgctgttcttcaaccacttccggtgcgcggatttccgccacctctttcagtttgccgcgcaacactttgttgatgtcggtcatctcatcaaagttgtcgcagcaatagtgatacatccacttcatcacctgatcggcgcggaagggtttttcacctaaatctttaaaaaactcccgcatctgctgacggttgagatccagcaggttgatttttccatctttcgtggtgacgttttcaggtgtgactaattgttcagacatatgctattccggcctcgttattacacgttatggcccctggagggttgaaaaaagaaacgccccggtgagcggctgctcgtccgggggcgctgcattgtacaaattctggcgcacggatgccacgtttgcacgcggcatttacgaaattattaacgggtgcgcgggcacacttcgccttcgccaaagaaataagcgatttcgcgagcggcagattcgacggaatcagaaccgtgggtaccgttttcggtcaggctgtcagcgtaatcagcgcgcagagtaccagccagtgcgtttgccggattggtcgcgcccagcagatcgcggtgacgctgaacggcgttttcaccttccagcacggaaaccacgatcgggccagaggtcatgaattcaaccagaccatcaaagaacggttttccatcgtgttcagcataaaagccacgtgcctgttcaacggtcaggtgcagcattttggtgccaacaattttgaaccctgcagcttcaaagcgcgcaaagatattaccaatgacgttttttgctaccgcgttcggtttgatgatggaaaaagtacgttcaatagccatttttacctctgtaaattgttctgttgttgtctgtaccagcgtacgagatggcgcggattataatgagcaacagggccgttgactattgatgaaggtaacatttttttaaaataaaatgagttttagcaacaatcagggacaaaacagattattgcatgacaaatttcactgtcgcgatttgccccacgtcatccatcaccagcaattgataatcacctttatccgtcaaatgcagggtcacgttgcgcccgcgttcagttaacggttcgccattcagaaaccaccagcgttcacctgcccctccactactttgcaacggcaaagtcgcttccgctgcgcccggtaaacgtttaataatcgcgccatcgcgaacgcctgtcagctgcagcgggagctgggcatcgtgaccgtatggcgggcaacttgtgctggccggtggtaagcgcacagcgcgacgttcacttgcgggcagccagggttccagcggtagcggccagacatttatcatttcttgtcgcgcttgcgggcaatcagcggcaacacgtttgccattttcatccagccagatggggaaacgaatgccattaatgccttcctgctccggcagtaatagagttggcggctgactcccgtccagcagccaggttgccaggcggcggcgacagttaccgtcaccttccggcaaagactgtccgcccggccagcagataacgccacgagtgacactgttcgggcgcgggtcttccggcagattcgcactgcggctcagtaagatattattgacctgattcaacaatggtacggcactggcaaagccaaactgaccaacaacgggcgtgccgtccggtctgccagtccagatcccaatgacatagcgagcgttaaccccaatcgcccaggcgtcacgatagccatagctggtgcccgttttccatgccagtggggcgacgcgcggcaaggcactatccggcaagggttgcgcttcatcagccataatccggcgaatgatccacgccgccccgctgctcattaaaggccgttcaagcagcggatcgtcaggctgtaagcgcaatttgcctgccttgccgtggcgagcaaacgcggtatacgctgccgccatatcttccagttttgcaccagcgccgccgagaatgagactaagattcggcgcagcaccgttgggcaaatataacggcaatccaacattgcgtaactttgccgcaaaccgtttcggtccataggcttccagcacctgcacagcaggtaagttcaggctgcgcaccagcgcctcgctcatgctgatcgggccatgaaaaccgctatcaaagttacctggtcgataatcaccggtgcgccgggggacgtcttgcagcagacttgccgggtggatcaagccttcatccagcgccagaccataaacaaacggtttgagcacacttcctgggcttcggatgctattgaccatatcaacatgaccaaagcgactatcatcgttgagatcaacgcttcccacccagccgcgaacacgcatatcggtatgatcaaccacgatcatcgccagactgctgcgcggtggcaaccgccctttccagttttgcgccagttcttccagacgtcgttgaagaccggcatccaacgtagtagtgattttgtcgcttttgcttttaccgagcatcatgcggctaaacagcggtgccagttgcggcatttgtcggggggccagccagatgggttcttccctactctcttttacctgctcacgggaccacacaccttgcacggccatccgttcgagcactttattacgcgcggcttcggcacgctccggccaacgatccgggcgaagacggctgggcgcttgcggcaaaaccgccagcattgccgcctcggaatagcttaaattcgcagggctttttccgagataagcccaacttgccgcaccgatcccctgcaacgtaccgccaaacggagcgcggttaagatacaaggtcagaatttcacgcttagacagatgccattccagttgcaacgcgcgccagagctggcgaattttgccgccaaatgttttggggtgaggatcaagcagacgagcaacctgcatagtgagcgtgctgccaccggaaataacccgtccgctagtgagatcttgccatgctgcgcgcgccacgctgaatggattcacccccggatgcttccagaaccagcgatcttcataattgatcagcgcttcaaggtaacgtggagaaacatcttcgattgttaccggataacgccagatgccgtcagcatcggcgaagcgccagagcggcgtaccatcctgcgccacgaccactcgtgcgggattgacttcatgcagcggtagaggccagagtttatctgctccccacgctgcaagaaaaaggagaaagggcgcggctgccaacgttatccagcagccgcgtttggttaacaagcgaggcatttacggtctgacaatcagcagatcttcagccgcgccggtcgcccgccattggggaacatacatactttccaccatcggttgcggtacctgatacgttcccggcgtcaccgcccgcgccagatacaccagcgttaccggttggtattcatcaacggcaaccgccgccacaaagcgatcgtcacggaactcaatgtgcttaatgctcgcctgctgcatctggttcagtaagttctgcacttcgccaccactttgctccaggctggcgctaccgttcgccagattctggttttccagttccagacccgcaggcagcagatccacgactaacgcatccggcacgctgttactggcttttacctgcaaccacaccagcaccagatcgccgctacgtaagctgtccaggcttttgctcttaccatcagtaccaagaatatgacgctcgatttgcagcacattgttcgccggtaaaggtgcggattgcggataaccgctggcatccatacgcaaccataacggctgatcgccactgttgctcacctgcaaggtgacaagttgatcgctattcagattgctgttttgcgctttctcgcctgtcagctgctcagcactgaaagaggtttgcgcctgccatttaccgggtaaatcctgaatcgtacgggcagccaggaacaacgcgttactttcctgcgtgcttagccagcgttcaccaaacgcctgctggctaagtgtgttcagcaaagtgtactgctcatcgggtagcagtttattttcttccagcaaggagagcattaacgcgttgtcgcgcagactactaccgtaatcacccagccatatccgctcatcactattacgcggcgttttcagcgccagcgcaatcgcttcttcaccacgcgtcgcatcacccatggttttcagcgcaacgccaagttgcagcagcggtaaaccagaagcggcatctgcacgatgctcccagatttcacgcagcgcacccagcggagccttttgctgacgggccaacaccagcgcagcgtaagactgtacggcgaatttactggctttgagattatccgcgtacgggatgctcatcatgcccggatcttgtaaatagcgcagcagacgctcattaccccggttaatggcgtctgtcggcacgctgtaaccctgttcgcctgcgcggaccaggaaatccatcacgtaagccgtcagccagtactcttcgtcaccgtttttatcccacagcgcaaagccgccgttatcacgttgcatttgcagcaaacgggaaatgccgatatcgacgcttgcacggcgtttctcatcactgtcgcctttgatgcccaacgcctgcagttgggctgcgttggtataaagactcggaaacaggccgctggcggtttgctcaagacagccgtacggatacgcttttaactctttgatataacgtgcgatgttcagcggtggtttgccgctcaacaacaattgcccttccagcgtaacagggctgaagttttgcaatccatccgccggaatcgcccatgtctcaccaggctgtaacgccgtaccgtaattaaccgtttgtgccgggaacgccggacggacgccgattttccactgcttatgctgatcggcaacggtttcacccggtaacgctaacccgctaatggtggcctgaatttctccatcgccataacccggcaatgctcgcaccgggataaacagcgtagtacgcacacctggcgctaattcaacggctgcgggactatcgctgaccagttcaagcaaaccactggcggtcagggcaacgttcagtttttgcggtttatcggtaagattagtgatatccagcgtcagacggctggtatcgccactcgccataaagcgcggcatgttcagttcagcaatcaccggtgcggcaactatcactttactttcgttgctaccgaagtcatctgccgtccaggcttgcgccatgacgcgcaattcaccgttaaaatcgccaatcggcagtgtaacgctgccttcgccctgttcgttgagcgttaccggcagcgcctgctgcacgacaatattgacgtgattgaccggcggtttaccaccacgtttcagctcatcaccatcgccaccgaaacgcagagctgccagacgcccctgaccttcaataacctgaccgtaaatatcgtaaatgtctgcgccatagcgtttctgaccaaagaacgcctgccacggatctggcgtgacgtagtcagtaatattcagcacaccactatcaacggcagacaccagcacattcacctgtttaggcttctcgccatttttagtgctggctttaattttcacggttaatggttgattgggacgcatttttgctggtgtttccagcgccagatcgaggcgacggttttcatcgccaagcggcagatgcaacacaccaaccgcgcgttttggcgtcgcggagcgagatttatcgccaggacgtaccaccagcgtacttaaatacagatcatgacgattccaggttttatcgaccggaatcgtcagatccagcccttgagcccgaacatcaatctcttgccaccacagcggcccttcactggactcgaccatcgcataacctttacccgccgttggcgcggcgatatgcaacttaatggtgtcgccagggcgataactggctttatccagtttcagcgtgacacggtcgggtcgcactgcgccgctaccgtcgctgttgtcctgccagctatagccagcccagaaacgaacactactgaccgcttcattcggcgctttgacttccagacgataagcgccccactctaccggaaaactgaccttgccggtttcgtccgctttcagatccagagtttgttcattttcgatcagatctttttgatcaaactgactctgccagccttcatcttcactccagttccagtagtaatcgcggcgttcgcgaatcaggcgcacctgcaagccgctcacggcttttttcacgccttgcgcatcgctataaacgatgtcaaaagcggcgttactgccttcatcaacaatgggctgtttcaccgtgctgtcagtacgataatcgtaaacgcttttgctggcgaactgcggacggatccccggcaatgcatcggcaggccagatagcctgctcagcgcggcgcgtcaccgggcgaccgccgctttccagcaaactaccctggaaaataacctgtaatggggaatgcgtttccttccactggctttctgtagaaacttcgccgcgccctttatcatccagcgtcaactgaacttcatccagcgtgcgggaaagattttcggcagctatatcgccgaattcaaaaccaggtaaggcactcacagcttcacgcagtgggcgcaggaaaagttgcccttgcaaagtattaccattagcaggtgcaccatacaggtagtaccccaccacggagaatttcacttcatctttcggcgttagcggggttttctcaccggtcagattcagcgccatgcgctctggcataaaatcttcgacgtggaaatcccacatccgatactgattatcgcccgtgttagcgcgaatatgccacataccggttgccgcattgctatcgagtggccaggtaaagtggtagaggccattctccggctgactaacgacgctcctgagtacctgcccatcgggtttaatcacgtctaacttgatgggttgattgggcaacgctttaccgtctgcatcacgcagcaaaccattgaggattaccgtttcacctgggcgataaagatcgcgtgggccaaacatgaaaaactgtttgctatagcctggcgcgccagcaatgttaaattctgctaagtccagcgccggaagttttaaatcgagtagcgttgtctgaccgtctttacgcgccaacagtaatgccgcgtttttatcattttccagctgcacatgcccctgagcgtcactggttgcctgagtcagagtctgccctttctcatttaataaagagacttcaattccttgctgggccgcgccgttttccagactttgggtaaagatatccagacgattgtgataacggtgagcactaacgccgatatcacttaacgtaaacagcgtcgcgggattactgtaatcgtaacgtccagcctgattcatcacagccagatacacgcccgcctgctgaagcggtttgatatcgcccagcggcagcaataatttttcacgggtgttacgcgcaggattgagatcaaaccgtccggtgtagaccagatccgccatctgcagcagtttgtcactctgccagttcgccaggctattgcggtattcccattggctaatgaatgctggcagagattctggcttaacgcggaagaagttaacatcgacattattaacgttgagcgccattaccggcagcccttcaacgactttgccaggcagcaggctaccacggctggcaaaaccgacgctgggttggatgtcgcgggtagttatagttttttcgtaatctttactgaaggttgcgttgttgagtgctttgacctccttgccaatagtaacgatcaaatcacgtttcggttcgaggtggcgtaaacgtaactctttaagattatcactcagctcccaggcaccatccactttgccgctttttttatcgacgacatgaataacgcgactgaaatcctgatccgggtcgagagggatggagaacgtcagcaccagcgtggctgcaccatcaagttggacttcagagagatccagcaatgtcagcaccttaccggcactctgttgggccagtttttgtctctccggcacggagagttttgcactactcgcgttttcactagaggccgctttagtaacttcagaaggcgcatcttttttcaccgctgttggcgcgttatcgttgttgtcgcaccctgccagcgccagcattagcatgcaggcggctacgcgtaactttttcatttttcatccctgccacaatggcccgttagcaacgtcgaataattattatgcgtgagaatttacgttatgtaattcagtatcacgcccatacaatccgaattttagtgagaattgtggctcagacagccaaatcagcctcttttgcttgtcgcttttcactaaacatccgacaatttagcctaaccccggcaaaaatggagatgcctatgtccacgacatggtttgtaggagccgactggctcgccgaacatattgatgacccggaaattcagattatcgatgcccgcatggcgagccctggacaggaggatcgtaacgttgctcaggagtatctgaatggacatattcccggcgcagtgttttttgatatcgaagcgctttctgatcacacttccccgcttccgcacatgctgccgcgcccggaaacgttcgccgtggcgatgcgtgaattaggcgttaaccaggataagcacctgattgtctatgacgaaggtaatcttttcagtgccccacgagcatggtggatgctgcgcacctttggtgtagagaaagtgagcattctggggggtggacttgcaggctggcagcgcgatgatctgctgttagaagaaggtgcagtagagctgccggaaggagagtttaacgccgcgtttaatcctgaagccgtggtgaaagtaaccgatgtattattggcaagccatgaaaatacggcgcaaattattgatgcccgcccggctgcacgttttaacgcagaagttgatgaacctcgcccaggtttacgtcgcggacatattcccggagcactgaatgttccgtggacggaactggtgcgcgaaggcgaactaaaaacgaccgatgaactggatgcgatattttttggtcgcggcgtcagctacgacaaaccaattatcgtcagctgcggctctggtgtaacggcagccgtggttttgttagcactcgcgacgctggatgtgccaaacgtgaaactgtacgacggcgcatggagtgaatggggcgcgcgggcagatttaccggttgagccagtgaaataagtattttacaggcaataaaaaaccgccgaatttggcggttttttattgctagtctggttcgcggcctttccagcaggttgacttgtgttacatgagcaacgcaggtgcttcacagcaaaacaatactcaccagtaactctctttttgtcaagcaaaagagagtaattattgtttatttagcgtattatcgacaccggccctttccgccgtgttcggtaataaaataacctggcttattagtccgaattcagacaaatataaataaatcctgctcaaaattaaaaattctaaccggtaaaagatattacttaaacatgtaaattcactttcctttaaaaaacaaaaaaccgccaaaatcaggcggttttttgttgctggtccggttcgcggcctttccagcaggttgtattaccgtagtaatgcaagcgcgtctcagcggagacaatactcgccagtaactctctttttgtcaagcaaaagagagttattattgttctgttagtgtattatccactgcggccctttccgccgtctcgcaaacgggcgctggctttaggaaaggatgttccgtggccgtaaatgcaggtgtttcacagcgcttgctatcgcggcaatatcgccagtggtgctgtcgtgatgcggtcttcgcatggaccgcacaatgaagatacggtgcttttgtatcgtacttattgtttctggtgcgctgttaaccgaggtaaataataaccggagtctctccggcgacaatttactggtggttaacaaccttcagagcagcaagtaagcccgaatgccgccctttgggcggcatattttagattatccgattctgtttaaagtcacgcaaaaaaccaccccagcgacgttcatagaatggcgcaatatgttcggtaataaagtggctaattcctttttccccttttttcacctgacaaatatcgattggttcatcgccaggtaatgtatcggtcgctacacttcccgtcgcctgaataatttcttcgatatcaccatcggcttcaatgccaataagtaaattaggctgtgcctcttcgttctctttaatactacaaataaaagcacgcttcaccggcttaatggttttaaataaggtggtgagactatcaatcatttgtgctggcggctctgcgacttcgcttaatatcaggctttcaccgccttccaggatttcctggctgctcagcggatttccctcttcaccaatcaacaaactgatttcacgcggcataaattctttaccggttggcagtttggcattaaggaagagcgtttcgccaagtgtcatctcaaacagcgtgcgaacgggcattacgacaaatgcctgttcgtcttcaaccgcctgttgaagtgcttctaagctggtgaaaaaaggaatgacgctggtgccgtcttctttttcccagtgctgtaaatcaagcgcgctatcttcaaccacagcctcgccctgcgccgccgtaccaggcacccagacggtggattccagtagagtacggaaaaaggccgggcggtgcgccggttcagttgctgctttttccagcaggtcttcaagttcgttttttgtttcggacataagaaccacaattcattcaacgttcggggcgcaaatgcctgatgcgctacgcttatcaggcctacaagggattcgcaatttgttgaatttgcagaatttgtaggccggataaggcgtttacgccgcatccggcatattagtttacgccgttaacagattagctatcgtgcgcacaccaagtcccgtagcgcccgcagaccactgttcaaccggcgctttacggtaagtcgcgctgcagtcgatatgcagccagccttgctgatagttctcaacaaagtggctcaggaagcccgccgccgtgctcgcgcctgccggatacgccgcgcttccggtattgttcagttcggcaaagttagacggcagctggctgcggtggaactccgccagcggcagacgccagaacggttcgttctcctgcgcggcactcgccagcaagcgaccggccagcgcatcgtcaaaactgaacagcgcgtgataatcattacccagcgcagttttcgccgccccggtgagggtcgccgcatcaatgatcatttccggtttctgcgcactggcatcaatcagaccatcggcaagcaccagacgcccttcggcatcagtgttcatcacttcaacttttttaccgttgcgataggtgatgatatcgcccagcttgaacgcattgccgctaatcaggttatccgcacagcagaggaacagcttcacgcgcttgttcagtccgcgcgtaatggcaaatgccagcgccccggtaaccgttgccgcgccgcccatgtcgctcttcatgctgtccataaacgcagtctgtttgatgctgtagccgccggagtcaaaagtgatacctttacctaccaggcacgcgtacactggcgcttctttatcgccagttgggttgtaatccagcgccagcaataccggagaacgttcactaccgcgtccgactgtgtgcagccccatataaccttgctcacgcagatcttcgcctttggtgatccgataagtcacacgatcgcccgcgacgttgctgatcagatcaacagcacgctgtgccagttggcttggtcccaattcttctgccggtgcgttgatggtgtcacgcacccagtcgatgatcatcaggcggttatccagttcctggcgctgggcatcgtccagatccggccacaccactttacgcgtgcctttcggggctttgtaaccttgccagaatgcccagcagcgatccgcatcccagccttcaccgcttaactgaacatgcttgatgcccagaccgtcaatcttgcgcgccgcacgctggatcagccccagatcgtctgccccgttcaaatgcagggtaatgccgtcattattaatgctgtaagttgctttttctccccagcgcgcgtcggcaggttgggtagagagggtaatcttcatcgcttctgtcattttagttatccttctttgtaaaagggccgccagttggcagccccaggatttttccgctaaatgattcgcgttgcaggaaggcggcaagtgagtgaagccccaggagcatagataactatgtgactggggtgaacgagcgcagccaacgcatctgcggcgtgaagcatgacgcggaaattattcggcctcgtccagccagactaacaaaatcgcttcgaggattttctcgttggatgcctgcgggtcgtcgtcgaaatcttccagatcgcaaatccactgatgcatatcggtgaatcgaaccgttttcggatcaagatcgggatacgcatcgtacagtgcttcgccaatttcgcggctatcggtccacttaagtcccatactaacctctgttaatgctcacgcgcatggttgatagtgtaacgcgggatttcgactactaaatcttcgtcggtaacgcgcgcctggcagcttaaacggctttccggctccagtccccaggctttgtccagcatgtcgtcttcctgctcactgctttccggcagactgtcaaaaccttcacgaacgatgcagtggcaggtggtgcaagcacaggatttttcacaggcgtgttcaatctcgataccgttacgcagagctgcgtcgagaatggtttcaccgctattagcttccagaacagcgccatcagggcagagatcctgatgaggcaaaataacaatctttggcatattaaacctcgtccacggaatggcctttcagcgcacgacgaacgctctggtccatgcggcgagcggcgaaatcctgggtttgtttgtctacgtttttaatcgcttgttcgatggcgtcaacatcatcgccctgcgccacttcactcaggtgagcggcagcatcgtcaatgacctgacgttctgcggcgcttaacagcgcggcatcagcagccagcgcgccgtgcagactttccagcacacgcgccgcttctactttttgttctgccagcattcgggcttttacgtcctgctcggcatagctcatactgtctttgatcatgctagcgatttcgctatcggtcagaccgtaagacggtttgacctgaatagacgcctcaacgccggtggatttctccatcgccgtcacgctcaaaagaccgtcggcatcgacctggaacgtcacgcgaatatgcgcaccgccagccggtagcgccggaataccacgcagcgcaaaacgcgccagactgcggcagtcctgcaccagttcgcgctcaccctgcattacatggatagacatcgccgtctgaccatctttaaaggtggtgaaatcctgagcgcgggccaccggaatagtggtattacgcggaatcactttctccaccaggccgcccatcgtttcgaggcccaggctcagtgggatcacatcaagcaacagcatttcgctgtctggcttgttacccaccagaatatccgcctgaatcgccgcgccaatagcgacgactttatccgggtcgatggaagtcagcggtggacgaccgaaaaattcgcctacccgttcacgcaccagcggcacgcgagtagaaccgcccaccatcaccacttccagcacttcatcagcttctacacccgcgtctttcagcgcgcgacgacaagccagtaaggttcgttttaccagtggcgcgatcagttcattgaattgttcacggctgatttcgccctgccagcccgcaacgttaacggtcacggagtccgcatcgctcagcgcgattttggctgcaatggcggcatccagcagttcacgctgaacgcggttatcgctacgatcaggaatgcccgcctgctcgcgaatgtaatccgccagcagatggtcgaaatcatcgccgccgagcgcggaatcaccgccggttgccagcacttcaaacacgccgcgacttaagcgcagaatggaaatatcaaacgtcccgccaccgaggtcataaacggcgatcacgccttcctgaccggaatccagcccgtaggcgatagccgcagcggtcggttcgttaagtaagcgcaggacgtgaaggcccgccagacgcgccgcgtctttggtgccctgacgctgggcatcgtcaaagtacgccggaacggtgataactacaccatccagctcgcctgccagggcttcagttgcccgcgccgccagtgctttgaggatgtccgcagaaacgcgcaccgggttcagcagccccgccgccgtttcaatcatcggcaggccgttttcgctggcctggaattgataaggcagatgcggatagcgttgctggatatcagccaggctgcgtcccatcaggcgtttaacagaactaattgtgttggcggtatcgagcgctgcattagtacgcgcgtcataacccacgctatgcccttgctgttgatagtgaacaacagatggcagcaggtgacggccttcatgatcggctaacgtttcggcctgaccgctgcgcactgtcgccaccaggctgttggttgtgcccaggtcaataccggccgccagacgacgctgatgcggcgcagcactcaaaccaggttcactaatttgtaataaggccatgtttagcttccagaaattaaaaatcgagcagtttttcttcgagttgttcggcactgcttcgcagtttatcgagaaaacgcagcttacgcacggtatccgccgccgcgtcccacgtctcgttgtctaactgttcaaccatcaactgatggcgggtatcaaacatctttttcacacgtttgataaagctttccagccgcgcttcatctttcgcctgttcgatctcgtccagctcttcgcgcagctccaactgttccatcaggaacgcggtgtcgcgcacagtatgctgctcgctggcgagatcaaagccgtgcaaagaaagcaaatattccgcgcgcattaacggatgacgcagcgtttgccaggcctggttaatggttgcagattgctgtacggcggcgagttgttccgcctggcttccgctggcgaatttatcaggatgatactgacgttgtagatcctgaaaacgcaggctcagcgcctgggtatcgagttgatagcgggcaggcaagccaaagagggtgaagtaatccataacattctcagggctgcgatccgccgcgataacggcgaatcaggtaaaacaaaccccacgcgcaggcgaccacggtggggttatcggtatgcgcatcaaacgtggaagctttcgccgcaaccacactcatctttgacgttcgggttggtgaatttaaacccttcgttcaggccttcttttacgaagtccagctgcgtaccgtccagaaattgcaggctcttgccatcgaccacgactttcacgcctttgtcttcaaacacgatgtcttccggcgtcggttcgtcaacaaattccagtacataagccataccactacacccggaggttctcacgcccagacgcaggccaaaccctttaccgcggttagccagaaaggtatttactcgcgctgctgcactgtcgctcagtgtaatgctcataaccaaacctcaactcttattttgcttcacgtttgcttttatagtccgcaatggcggctttgatcgcgtcttctgccagaatagaacagtgaattttcaccggcggcagttcaagttcttcagcaatatcggtgtttttgatcgcctgcgcttcgtcgagagacttccctttcacccattcggtgaccagggagctggaagcgatagcggaaccgcagccgtaagttttaaaacgcgcgtcttcaatgataccttcatcgttgactttaatctgcaacttcatcacgtcgccacaggccggtgcccccaccatgccgctgccgacgttctcgtcgttgttgtcaaaggaacccacgttacgcggattctcgtaatggtcgataactttttcgctgtaagccattataaattctcctgattccgataccgattaatgatgagcccattcgatgctgttcagatccacgccctgcttgtacatttcccacagcggagaaaggtcacgcagacgaccgatggatttacgaactaactcgatggtgtagtcgatctcttcttcagtagtaaaacgacctaaagagaaacggatagagctatgtgccagctcgtcgttcagccccagcgcgcgcagcacgtaggacggttcgaggcttgcactcgtacaggcggaaccactagaaactgcgaggtctttcagcgccataatcaggctctcaccttcaacgtagttgaagctgacgttgagaatgttcggcgcaccgtgttccaggtcaccgttcaggtaaacttcttcgatatctttgatgccgttccacagacggttacgcaggccgcgcagacgttccatctcggtcgccatctcttcttttgcgatgcgataggcctcgcccattccgacgatctggtgaacaggcagagtgccggaacgcataccgcgctcgtgaccgccgccgtgcatttgcgcttcgatgcgtacgcgcggtttacgacgtacatacagcgcaccgatacctttcgggccatagattttgtgaccggagaaagacatcaggtcaactttcaactggctcaggtcgataggcagtttacccacgctctgggttgcatcaacgtgatagataatgccacgagcacggcacatttcgccgatagccgcgatatcctgcaccacgccgatttcgttatttacgtgcatgatggacacgaggatggtgtcgtcacgcatcgctgcttcaagttctttcaggtcgataatgccgttacgctgcggtgccaggtaggtgacttcaaaaccttcgcgctccagctgacggcaggtatccagtaccgctttgtgttcggttttgctggtgatgatgtgcttgccttttttctgataaaagttggctgcacctttgatcgccaggttgtcagattcggttgcaccagaggtaaagacgatttcacgcggatcagcgccgaccagatcggcaatctgattacgggcgatatctaccgcttcttcagcctgccagccgaaacggtgagaacgggaggccgggttaccaaaggttccgtccatcgtcataaactgcatcattttctcggcaacacgcgggtccaccggcgtggttgcggagtagtcgagataaatcggtaatttcattgctctataaactccgtacatcactcaatgcaaggaatcaggctaccggctggatgtacgaccgtgtttacggagtatttagcactccggcctgattctgaattctttttattaagcgcgtaacttaacgtcgatcgcgtcttgtgtgcgggtgcgtggcgcgtcgtgagtatgctgacgaccagacacatccagcacttcctggttattaaccagttcgcctaaagtaatgttgttgagaaaaccggtgagacggtcgctcaaatcacgccacagcgcgtgggtcaggcatttatcgccgccctggcagccgcctttaccctgacaacgggtggcatctacagattcgtcaacggcgctaattacttcgccaacggcgatgctgctggcatctttgcctaacagataaccaccgcctggtccacgtacgctggaaaccagaccatttttacgcagacgggaaaacagttgttccagataagaaagggaaattccctgacgttcggaaatatcagccaacggtaccgggcccgcttcagagttgagcgcaacgtcaagcattgcggtcacggcatagcgccctttagatgtcagtctcatgtcttacttcacctcaaactcgcccctgcccggggttttttattgtaaaagtgggggtattgcatagcagggtcaagtctgacattcccgagtaaattggtcaactatttacttgactgatttagtcgggtatttaaccttcagtgccatttttttatcgtggcgtttgtacctgttgtcggatgcggcgtgaacgccatatccgccctggggttctgtacactgtaggcctgataagacgcattacgcgtcgcatcaggcaacggctgtcggatgcggcgtgaacgccttatccgacctacggttctgttcactgtaggcctgataagacgcattacgcgtcgcatcaggcaacggctgtcggatgcggcgtgaacgccttatccgacctacggttctgttcactgtaggcctgataagacgcattacgcgtcgcatcaggcaacggctgttattcggccttgttacctttattctgctgctcaatagaagccagaatcccgcgcaggatattcaactcctggctttccgggcgcgcacgggtaaacagacggcgcaatttattcatcacctgccccggatggttttcacggataaaaccggttgccagcagcgtttgttccagatgaccataaaaacgctccagatcatcgaccagcggatacggcgtctcttcatgctcgacctgctcgccgttttcctgagttgccagccaggccatgcgcacttcataggcaataacctgaaccgccatcgccaggttcaggctgctgtattccgggttagccgcaatcgcgacatgataatggcatttctgcaactcttcattggtcaagccgacgcgctcgcgaccaaacaccagcgccaccggggtatttgccgcttcagcgacgcttttcaggccgcattcgcgcgggtcgagcatcggccatggcagcgtgcgggaacgtgcgctggtgcccaccaccaggctacaaccggctaacgcttcgtcgagcgtatcgacgatgtgagcattaccaatcacatcgctggcccctgctgccagggcaatcgcctgggagtcgggtttcaccagtggattaaccagccacagattggttaatcccattgttttcatggcacgggcaacagaacccatattgccggtgtgactcgtctccaccagcacaattcgaatattttgcagcattgtctttcttcatctaaagattattcacgcatcttatcataaaacgaagacagatgccgatctcgctgctatactctgcgccgttttcccgttctttaacatccagtgagagagaccgatgcatccgatgctgaacatcgccgtgcgcgcagcgcgcaaggcgggtaatttaattgccaaaaactatgaaaccccggacgctgtagaagcgagccagaaaggcagtaacgatttcgtgaccaacgtagataaagctgccgaagcggtgattatcgacacgattcgtaaatcttacccacagcacaccatcatcaccgaagaaagcggtgaacttgaaggtactgatcaggatgttcaatgggttatcgatccactggatggcactaccaactttatcaaacgtctgccgcacttcgcggtatctatcgctgttcgtatcaaaggccgcaccgaagttgctgtggtatacgatcctatgcgtaacgaactgttcaccgccactcgcggtcagggcgcacagctgaacggctaccgactgcgcggcagcaccgctcgcgatctcgacggtactattctggcgaccggcttcccgttcaaagcaaaacagtacgccactacctacatcaacatcgtcggcaaactgttcaacgaatgtgcagacttccgtcgtaccggttctgcggcgctggatctggcttacgtcgctgcgggtcgtgttgacggtttctttgaaatcggtctgcgcccgtgggacttcgccgcaggcgagctgctggttcgtgaagcgggcggcatcgtcagcgacttcaccggtggtcataactacatgctgaccggtaacatcgttgctggtaacccgcgcgttgttaaagccatgctggcgaacatgcgtgacgagttaagcgacgctctgaagcgttaatgactcaggcgggtgatatcactcacccgccctcgcctttcaggcgctattccgaaatacttcctcactgctttactttctttcgtcactctcccaccatctttccccgattaatggatgataaagaagagccaaggaaaggttatggcactgccagtgaacaaacgcgttcccaaaattctgtttattctctttgttgttgccttctgcgtttatttagtgccgcgcgttgccatcaacttcttctattatcccgacgataaaatttacggtcccgatccctggagcgcggaatccgtcgaatttacggctaaggacggtactcgtctgcaaggctggtttatcccttctagcacgggccctgctgacaacgccatcgcaaccatcattcatgctcacggcaatgccggaaatatgtccgcccactggccgctggtcagttggttacccgagcgtaatttcaacgtttttatgtttgattatcgcgggtttggtaaaagtaaaggcacgccgtcccaggccggattgctggacgatacgcaaagtgccatcaatgtggtgcgccatcgcagtgatgtaaacccacaacgtctggtgctgttcgggcagagtattggcggggcgaatattctggatgttattggtcggggtgatcgtgaaggcatacgtgcggtgatcctcgactccacatttgcctcttatgcaaccatcgccaaccaaatgatccccggcagtggctacttacttgatgagagttacagcggcgaaaattatatcgccagcgtcagcccgatcccgcttttactcattcacggtaaagctgatcacgttatcccatggcagcacagcgaaaagttgtatagcctggcaaaagagccaaaacggttgatcctaatcccggatggcgaacacattgatgctttttccgatcgtcacggcgatgtttatcgcgaacagatggtggactttatccttagcgcgttgaatccgcagaactaacccatgatcgctagcacgataatcattcacaaaaccaccttaagacatgctaatccactggtcagaacagtttaagatgagaaaaattctgtgacgcttgccaacatttctgatgattagcattcccttcgccatttccttgagcaaactttagctattcttatcaattatgcttatgggagatctacagatgatgcctacgcttgctccaccatctgtccttagcgctccccagcgccgctgccagatcttgctgacgctctttcagccggggttgaccgccaccatggcaaccttcagcgagcttaatggtgtggatgatgatattgccagtcttgatatcagcgaaacaggacgggagatcctgcgctatcatcaactcacactgacgactggttatgacggtagctaccgggttgaaggtacagtgcttaaccaacgtttgtgtttatttcactggctacgacgtggtttccgtctgtgtccgagttttattaccagccaattcacccccgccctgaagagtgaactgaagcggcgcggaattgcgcgtaacttttacgacgataccaatctacaagcgttagtgaatctctgctcccgacggctgcaaaaacgctttgaaagccgcgatattcatttcctgtgtctgtatctgcaatattgtttgctgcagcaccacgctggaattacgcctcagtttaatccgctccaacgtcgctgggcggaatcctgccttgaatttcaggtagcgcaggaaattggacgccactggcagcgtcgggcgctccagcctgtaccacctgatgagccactgtttatggcactacttttttccatgttgcgggttcccgatccattgcgggatgcgcatcagcgggacagacaattgcgtcagtctatcaaacgtctggtaaaccattttcgtgagctgggaaatgttcgtttttatgatgaacaggggttatgtgatcagctttatacccacctcgcccaggcgttaaatcgcagtttgtttgccatcggtattgataataccctgccggaagagttcgccagactgtacccacgcctggtgcgcaccacccgcgcggcgctggccggatttgaaagtgaatacggcgtccatctttctgatgaggaaagtggtctggtcgcggtgattttcggtgcctggctaatgcaggaaaacgatctgcatgaaaaacagattattcttcttaccgggaatgatagcgagcgagaagcgcagattgagcagcagttacgcgaactaacgttactgccgctcaacattaagcatatgagcgtaaaggcatttttgcagacaggcgctccgcgtggcgcggcactgattattgcgccttataccatgccattaccgctctttagtccaccgctgatctatacggacctgacgctgacaacacatcaacaggagcagatccgcaaaatgctcgaaagtgcatgatcagcaactgggaacaactttcgggcgcaaaaacattgccggaagcgccaccagcgccattacccagaacacgccgtggcccagatattgatacaggaaaccggcgaaaacggtcatgatagcgatactgccgcccatcgcgacggcagagtaaaccgcctgtaaacggatgacttcgctaccctggcgagcagcaatataacgcatggcggccaggtggcagaccgtgaaggtgccgcaatgcagaatttgcaccactatcaaccacggcaacgccgtagttgctcccataatgccccagcgcactacgccgcaaatcgcgctgatcaacagcatatcgcgtgcactacaacggcggaaaagtttattactcagcgcaaagataatgacttccgccaccacgcccaggctccacaaataccccaccgcgctggcgctgtagccagctgcctgccagtaaatggcgctaaaaccgtaataggccgcatgtgccccctgcaataaacaaacgcaggccagaaagcgccagttctggcgaaccagcgccaaccacgcagaccaaccggtgctctcctgctggcgacttgccccttgtggctgaatcgtcggacggatgagaaagccgagcagcatggatgccacgcccaacgtcaacagcgcgaggatcacccgataatcaaacatagtgaccagtttgcccgtcagcgcgctgccaatgacaaacgccacgctgccccacagtcgcactttgccgtaatcaagcgggaactgcttttgccacgtattcgccagtgcatcggtcaacggtaccagtggactgaaaaagaggttaaagccaatcatcaccagcatcagccacgctacgtgcgcccccgcccagaaggcgacagcaaagagaagtgtcagcagtgccagcacgcgcaaggcggaaatcaggcgggaaggatcgctgacgcggggcgcgatgagcaaactcccgaggaaacgggcaaccagacctgcccccaataacaggccgatggtttctggcgttaaaccaatccctttaagccagacgctccagaaaggtagaaaaatgccgtaactaaaaaagtatgtgaaatagccgagcgccaaccagcgcgtggattgcaaaaccatgagtccctcccgtcaggaggcgttagtctggggttaatcgaatgttggtgcaagttgaaaaataagaatattcgagcctgcttcccgatgtctgtaacgccagttcacaagcactaaaaaactgagatccgcgacgcatgttgcaaaaataatgcgtaattatgccgttacgcttgccaaacgttcctgcacaatggcgatgaaatcgcgtaatgccggcttcatctcccctttcttccacgccatcagtaaagcaatggaaggcacatttccggcaatgggacgaaaaacaacctgtccggtattaaaattattcatataaccgggtatcaaagtgacgcccagccccatgcccaccagattcatggtcaccagaatattcgttgccacctggacgatatttggctggctgttttcttgcgcaaaccacgctttaacgatcggcgcaaggctaccggaatacaccggatcggtactgacgaaattcacgccatccagttgcgcggcggtgatctctttttcatgtgctaaagggtgatcaaccggtaacacaaccactaatggttcgtcaaaaagctccagataatcaatctccgggctataaacaggatggcgcattaagccgacgtcgagttcaccacggcgaattttttcctcctgttgcgtggtgattaaactcaccagctcaatcaaggtgtctggctgtctgagacgaaacatcggtaatacttttggcagtaaattcacttccgcgcttggcacaaagccaatggttaattgtctgtcttcctgaacaattttccgcgcccgtaatttggcattttccgcttgttcgaggattgccagcgcgtcctggagaaaacattctcccgccgccgtcaacgcgactttgcgcttatccctcaccagtaacggaacaccgacacagttttcaagatcgcggatctggctgcttaagctaggctgactggtatgcagtttttccgccgcacgggtaaagttcagtgcctgcgccactgcgacgaaatagcgtaaatgccgtagttccatcaccttccccttgttatcgaaaaaacgtctcagctggtagaaattaactatttcacatattagcaaccaaccagcaacatccttatggcacaaaaatagaaggtcaatacatcttatctttcaggattaaaaaatatgaccacacccagtgatttgaacatttaccaactgattgacacccaaaatggtcgggtcactccgcgtatttataccgacccggatatttaccaactggagcttgagcgtattttcggtcgttgctggctatttctcgcccacgaaagccagatcccaaaacccggtgatttctttaacacctacatgggagaagatgcggttgtcgtagtgcgtcagaaagacggcagcatcaaggcgtttctcaaccaatgccgccaccgggccatgcgtgtgagttatgcagattgcggcaacactcgcgcctttacctgcccgtatcacggctggtcttatggcattaacggcgagttgatcgatgtaccgctggaacctcgcgcctacccacaagggttgtgtaaatcccactggggactaaacgaagttccttgtgtggagagttataaagggctaatttttggcaactgggataccagcgcaccgggcctgcgtgattacctgggtgacattgcctggtatctggatggcatgctggatcgtcgcgaaggcggcaccgaaattgtcggcggcgtacaaaagtgggtgatcaactgtaactggaaattcccggcagagcagttcgccagtgaccagtatcatgctctgttcagccatgcttctgccgttcaggtattaggggcgaaagatgatggcagcgataagcgcctcggtgatggacaaaccgcccgcccggtgtgggaaaccgccaaagatgcgctgcaatttggtcaggacggtcacggtagcggtttcttctttactgaaaaaccggatgctaatgtctgggtcgatggcgcagttagtagctattaccgcgaaacctatgccgaagcagaacaacgtttaggtgaagttcgcgccctgcgcctggcgggtcataacaatattttccccacgcttagttggctaaacggcactgccacactccgcgtctggcatccgcgcggccctgatcaagttgaagtgtgggcgttctgtattactgacaaagccgcctccgatgaagttaaagccgcttttgaaaacagcgccactcgtgcttttggtcctgctggttttctcgagcaggatgacagcgagaactggtgtgaaatccagaaattgcttaaaggccaccgcgcccgcaacagcaaactgtgtctggaaatggggcttggtcaggaaaagcgccgcgacgacggcattcctggcattactaactatatctttagtgaaactgccgctcgtggaatgtaccaacgctgggccgatcttctgagtagcgaaagctggcaggaagtgctcgataaaaccgccgcttaccagcaggaggtgatgaaatgagtgcgcaagttagtctagagttacatcaccgcattagccagtttctctttcacgaagccagcttactggacgactggaaatttcgtgactggctggcgcagctcgacgaagagattcgttacaccatgcgcaccacagttaacgcgcaaacacgcgaccgccgcaaaggcgtccagccaccgacaacctggatttttaatgacaccaaagaccagctggagcggcgaatcgcccgtctggaaacgggcatggcctgggcagaagagccgccgagtcgcacccgtcacttaatcagcaactgccagataagcgaaaccgacatcccaaacgtatttgctgtgcgggtaaattatctgctttatcgggcacaaaaagagcgcgatgaaacattctatgttggaacgcgtttcgacaaagttcgccgtctggaagatgacaactggcgcttgctggaacgggatatcgtcctggatcaagcggtaatcacttcccataacctgagtgtactgttctgatgaatcgaatttatgcgtgtcccgttgcggatgtgccggagggtgaggctctccggatcgataccagccccgtcatcgccctgttcaacgttggcggcgagttttatgccattaacgatcgttgcagccatggtaatgcgagtatgagtgaagggtatctggaagatgacgccacggtggagtgcccgctacacgccgccagtttttgcctgaaaacggggaaagcgttatgcctgcccgccaccgatccgctcaccacttatccagtacacgttgaaggtggtgacattttcatcgacttaccggaggcgcagccatgagcgatctgcataacgagtccatttttattaccggcggcggaagcggattagggctggcgctggtcgagcgatttatcgaagaaggcgcgcaggttgccacgctggaactgagcgcggcaaaagtcgccagtctgcgtcagcgatttggcgaacatattctggcggtggaaggtaacgtgacctgttatgccgattatcaacgcgcggtcgatcagatcctgactcgttccggcaagctggattgttttatcggcaatgcaggcatctgggatcacaatgccagtctggttaatactcccgcagagacgctcgaaaccggcttccacgagctgtttaacgtcaatgttctcggttacctgctgggcgcaaaagcctgcgctccggcgttaatcgccagtgaaggcagcatgattttcacactgagtaatgccgcctggtatcctggcggcggtggcccgctgtacaccgccagtaaacatgccgcaaccggacttattcgccaactggcttatgaactggcaccgaaagtgcgggtgaatggcgtcggcccgtgtggtatggccagcgacctgcgcggcccacaggcgctcgggcaaagtgaaaccagcataatgcagtctctgacgccggagaaaattgccgccattttaccgctgcaatttttcccgcaaccggcggattttacggggccgtatgtgatgttgacaagccggcgcaataatcgcgcattaagcggtgtgatgatcaacgctgatgcgggtttagcgattcgcggcattcgccacgtagcggctgggctggatctttaaggaagcacgatgaaagaaaaaacgatcattattgtcggtggcgggcaagcggcggcaatggctgcggccagcctacgccagcaagggttcaccggtgagctgcatctgttttccgatgagcgacatcttccttatgaacgacctccactcagcaaatccatgttgctggaagattccccgcagttacagcaggtgttacccgctaactggtggcaggaaaacaatgttcatctgcattccggtgtaaccatcaaaacgctgggtcgcgacacacgagagttagtgttaaccaacggcgaaagctggcactgggatcagctttttatagcaaccggcgcggcagctcgaccgctgccgttgcttgatgcactgggagaacgctgctttaccctacgccatgccggtgatgccgccagactgcgagaagttctgcagcccgaacggagtgtcgtgattatcggtgccggaactattggtctggaactggctgccagcgccacgcagcgcagatgtaaggtgacagtgattgaactggcggcaaccgtcatgggccgtaatgcaccaccgcccgtgcaacgctatcttttacagcgccaccagcaggctggtgtgcgcattctgctcaataatgccattgaacatgtggtcgatggtgaaaaagtagaactgacgctgcaaagtggggaaacgcttcaggctgatgtggtgatttacggtattggtatcagcgccaacgagcaactggctcgcgaggccaaccttgatactgccaatggcattgtcattgatgaggcttgccgcacctgcgatcccgcgatctttgccggtggcgatgtggcaatcactcgtcttgataatggtgcactacaccgctgcgaaagctgggaaaacgccaataaccaggcgcaaattgccgctgccgcaatgttagggctaccgctaccgctactgccgccgccgtggttctggagcgatcagtacagtgataacttacagtttattggcgatatgcgtggcgatgactggctttgtcgtggcaacccggaaactcagaaggcgatttggtttaatctgcaaaacggcgtgcttatcggtgcggtcacgctgaatcaggggcgtgagattcgcccaattcgcaaatggatccagagcggcaaaacgtttgatgcgaaactgctgatagatgagaacatcgcgcttaaaagtctgtaaccaggataattagcgaatatctcaatgcctggggcgtggcgaggtgcaagagtgtgtattacgtttaaaagtcattatcttgcaaagggattggttatgaacacactacgttattttgattttggagctgcccgccccgttttgttattaattgcccgtatcgccgtggtcttaattttcattatttttggttttcccaaaatgatgggctttgacggtacggtccaatatatggccagcttgggcgcgccaatgccgatgctggcagcgattattgcggtagttatggaagtgcccgccgcgatattaatcgtgcttggctttttcacccgtccgctggcggtgctgtttattttctacacgctgggtacggcggtgattggtcaccattactgggatatgaccggcgatgcggttgggccaaatatgattaatttctggaagaatgtcagtatcgctggcgcgttcttgctattggcaattaccgggccgggggcaatttctctcgatcggcgttaagaaagatgccggatgcggcgtgaacgccttatccggcatttaataaattacagccactctacccgcaagctcatctcactagttgtactttcccctggtgctagcgcaatgagatcacccccttccgggcgatgatgatcatccggcgcatggctcatcggttccagacagaagaaatcaaacgcatatcctttatcaaacgcagggtcggaaacaaagatgaaataacacggtgcaggtggcgtcgtttccatgatgatggcataaccttcctgcggctgctcgatgcgggcctgaccattccatccggcaaaaccattgttcacccactggcgcggcaacggcgcgggctggttaaaatccagttcctgcggtagctgctcgcaaaactcacccgccagccactgctcccgctccagccagtaaccgctcgcctgtgcctgaatccgcgtttgcgggctcaacggaaaataaggatgccagccggtaccaaatggcagcgtctctgccccttgattggtgacagagagcgtcaccgtcagcgtatccgccgttaaatgaaacgcctgacttacccgatagtgatagacaccgctgcgatgttcatacaccagacacaaactatcatcgctgtggctgacacattgccactcgcccagccagccatcgccgtgtagatagtgcgcatcccactcaacattcggttgcagttgatactcacgcccctgccagacaaaacgattgccgctcacccggtttgcaaatggcaccagcggaaaacaactggcatcggttgccacaccgctttttttaccaggacgtaagagcggcgtcgtatcgcgccagaagccttcgattacgccgccctggtcagaaacgtccagctttaggctcccgtgggataaggtatagatggtcatccgctaactccttaatccgggaagttaatcacaactttcccgcatttgccgctcgccatcagcgcataggcatcacctgcctgttccaggctgaagcgatgggtaatggcgttacgcggccacagcttccagtccgtcagatcatgggcgcatttttccatatggaacagactggtcacccaggagccgataatccgccgttgatggtgcatcagatcggcgctgacctcgaattccacttttccggtttcaccaatgtaaaccacccgtccccagtcagcggtggattgcagtgccagcaagcgacctgcggcattaccggaacaatcgagcgcaacatccgcgccaccgtgggtgagttcggcgataatctgcggcagaccttcggtggttgctaaatagccgtgatccatcacccctaactgttttgccatcgccagacgttccggcagcatatcaacgccgatgatccgttttgcaccgcgacctttcgccagcatcatcgccatcatgccgactggccccagaccgaccaccagcacgttatcactgccggaaacttcgccgcgcaaaattccttcatacgctgtaccaacgccgcaactgataaacgcaccatcttcgtagctcagcgcatccggcaggaggatcagatctttttcttccgccagcaagtattcggcatgaccgccgtcacgctgccagccgtaagccgcttttccttcgccagtacaagaaataggaaaaccgcgacggcagttcgggcaaaaaccacagccagaaatgtgatacaccagcacgcggtcgccctctttaaaatggcggcagccttgccccatcgccacaatctgcccgcacggttcatgaccgttgataaagccctggtataacggtttatcgggtgccgccgctgtggcacggtgttgatgatagatatagtggacatcgcttccgcaaatcccggaggatttcattttgatcagtacctggttaatccccggcgtcggcaccgcaacttcccgcagatcgacggtgctatttcctggtaaataagctgccagcatcgttttcataaatccctcattaacaatacgattaattttcatccctgccgcacccgcgccaggggcgttaaggtttagcgtttcgctttactgcttcgctgggtcagcaagatattcgccagcaccgccaccacgatgatgacgccgcgtaccacctgctggaaaaaggagttaataccgagcagcaccagaccgttaccgattagcgtaatcaccagcacaccaagcaatgtaccgaacagggaaccgcgaccgccggaaagtgccgtaccgccgaccacgaccgcggcgatgacgtcaaactccagaccgtttgcggcacctgcgttaccagaaccgaggcgcgccgccaacaaaatgccggtcaccgccgctaataatccgctaagggtaaagataagaatgcgcacccgacgaacgttgatgccgcacaactgcgccgccgtagcattaccgccaacggcaaaaacgctgcgcccgaaggcggttttgcggctgatgaacacaaacagcgcaaacaacacaatcatgatcagcgcggataccggcacaccgagaaattgtccgcccagccagtccagcacctcgttttcatcaatcggcactggcagtgcgttcgtcataaacagccccattccgcgcagggcgctccacagccccagtgtggcaacgaaacttggtacattaaacacgccgcgcagcaccccggccagcgttcccatcagcgcgcctaacagcaacaccagcaggcacgccaccgccagcggaacttcaaattgcagcaaaaatgccaggcacacgctgacaaaagccaccatcggcccaacgctgacatcaatttcaccggagataataatcagcgtcatcgcccaggcggcaatcccaatggtggcggcatcgcgcagcacgttcatctggttattcaaactgataaagccaggcgcgttcagggagaagaccagataaagaatggcaatcaccaccagcaaaccgatctcattaatatggcgactgacaaattgtttgaggctgacgctcttgccctgcggcaatggtaaactgctagcagacatcttcaggttcctcggtaaaattcatcagtgcacagacagaatggcggacatcagctcatccacattgaccggagcgtgaaactcctggctgaacgtgccgtgctgtaataacaggatgcggtcacacaccagcggcaactcctccacttcactggagataaacaccacgctttttccttcggcagccagctcacggacaatacggtaaatctgctgtttggcttcgatatcgacgccgcgcgttggctcgtcgagcaacaaaatctggctggcagcatagacccaacgaccgatcaccactttttgctgattgccaccagaaagcgtgccgatgggtgtttcgctactggcggccttgaccgtcatccgctgcatcacctcttcggtcaggcggcggatggtggaccattgcagcacaccgttggcgctgattttttgccgattggtcagcactgtattttcgtcaacgcccaaccagggaatgatccccgcttctttgcggttttctggcgtatagccaatgccgcgtttcagcatgtcgccgtaatcggggcgcgtgattttctcgccgttgataacaatttcgccctgttcatactcctccagcccaacaatcgccttcagcaattcactgcgccctgcccccagcagaccagcaatgccgagcacttcgccacgacgtagcgtaaaactgatatcctccagcttgggcttatggcgtaacgcacggacttccagcacggcctgatccacaatttcctgaggggctaccggcgcaatatcaacgtgatcgcgcccgagcatcaggctcacaatatgatgcgtggaggtgttttcgagcatcacatcgcccgccacctgaccatcgcgcataacggtggcacaggaggcaatgcggcgaatttcttccatccggtggctgacataaatcaccgccacgcccagtgcgctcatctttttcaccgcgctgatcaccagttcaacttccgcactcgcaaggctactggtaggttcatcaagaatgaccacgcgcggctcgcccttcatcacccgcgcaatttccaccagctgcttttgcgccgggcttagcgtactaacaagttgttcaggactaacgtcaacgcccagcgcctgtaagcaacgttgggcatcctgcgccatttgcaggtaatcaatcatgccgttgcggcggggccactgaccgaggcagaggttttccgccactgtcagcccttccaccagacttaactcctgataaaccgcgcgcacccccagttcagcggcacggcgagtcagcgtagcttcgtcaccttccagtcgcgtctcgccaatccagatatcaccgctatccgggcgttcgctgccggtaagcattcgaatgagagtgcttttgcccgcgccgtttttacctaacagcgcacgaacttcgcctttattgagcgtgaagttaacgttatccagcgcaacgacgccgggataacgcttatttcctgccaccacttttgctaccgggactgcctctgttgccgtgaacatagggacctctgcgaatcagcgattagggcagaccatcaacgtgcgttgccagccactgtttaccgtcttccgttttggtatagagatcgataggcacctgaatcactttttcaccgtcggcttgtttattgataaccttcaatgtttgcgcgaaaacagcattgcccattttcttaccggaaatatccactaccgctttcagcacctgattgttttccagctcctgagcaatttcggttgtcatatcgctaccgaaaacagcaatttttccggcctgattttgattacgtaccgcttttaccgcgccgagtgtcgcaccgccgctttcccccataatggcgttgagatccggcgtggagataattagtttttcaccaacggaaatcgctttatctaaaacagtcccttcctgattagcgacaatttgcgcgccgggaacgcgggattttaaaacttcttcaaatcctttacgtcgctgcacacaaacttcaaaggcttcgcaattgatgacggcaattttcggctggtcaattttattggcaataaaataatcagcggcagcgttacccagttttttaccaaattccagcggatcgccgaccagatacgcgctgacatatttatcgacccccttttgattaatacaggtgttgtagcaaatcaccggaatgcccgcttcactggcgcgacgaacggtacggctactgccattttcagacactgcgcttaaaataatggcatcgacattacgcgccacgagggtatcaacaaaggtactttctttgctaatatcaccctgggcgttagtttctattaactgaacttgtacactggaatcttttgccgcatcctgaacgccctgacgcactccagcgtagtatccctgagtatcaaggtatattgcgccaatggtcatttctttttccgcagccctggcaaatagtgcgctacctaatagcgtagccattaataatagattacgggttgttctcatttttgtaggcatagagcctcctgtagggtttttattaacaacggcttattctaattattttgtgatgagcggcagcgcgtgccgctcaaatattacagttaatagggtttagtgaacgcggttaaaaataaaaggcatcacggtggtgaataatgccgctttcggccaagccggattaatcgccgtcaattcagcgcgagcagactcatattgcgcaacctccccgagtcccgcggacgccagcatcgccaccatcaggcatttttctttatgctgctgttgtaaatcgccatacaggctcaacaagtcaggttggctgacggcaaagaaatccgcttcgatactggttttcgccatctcttgcgcccactgtttcatttcactaaacagttgctgtgcggtttgttgttcgcccagcagtcgcagcgccatcccttgccagaagagataatcaaccggctgatcgttgtaataactgtgaatgttaatagtgcgatcgccggtcgccgccagacgtaaacaacgcgtcgcttcagtttcatcgccctgcgcgttggcgcatatcgcctgccagaaccagatgtcgttatcagtttgccccggtaaacggccttcgcttaaattctccggataatgcagcgcggcatgaagcagttcgcaggcctgctgcggctgtctggcatcaagatgctgccaggcgcgtaataactggttgaggataaactgactggtgaccttcccttccccgccttcccacgggtggaatttgcgcgtggcgagaatgtccgccgctttgtctgcctgacccgtgagatgccacaaattgagcagttctgcggtcatgtcgtcgcgtttcagcgcaatttccagattattttccagacgcgccagtcgtttctccggtgtggctccacttaacttatccagcaaatcccgttcgaaaagcagacgtgcatcctgcggcgcaagctgataagcattatcaagataacgcgcggccagctcataatcgtgttgcttattccacgcatggatcgctaacccgcgccagccgtcggcaaactccgggctcatctctacgcaacgttgccaaaaggcaatggctttgttgtagctacgtttgttgtagtagaagcaagctagtaaatggcgagcaaaccagcactcttcaatactctccagcgccgccacttcttccagcgtattcgggaaacggacaaactgcgggaagacatcaatggcttttgcgaccagttcgccacgttcggctttcggcagcaagctggcttgcaggtaaagcggcagcgtgcgctggcagtccagtgcgttcagcatctctgccgccagggtgggcattccccagttaatcagttgcccggcggtcatcagggcgttaacgtcgcgtccctgacacagaccgcgccactgcgcgagagcactttcgctacgaccatcgaaccagttcagccaccacagagtggcgttcagcggataatcgcgcagcagtttctcgcgctgcacacgcgcgttgtcctgacgaccacttaacaccagcagcagattatgcaggcaaagcacttcctgattggttgggcaggcgcgaagactttgttggcaaaaatccagaccagcgtcgaagttaccattacgcgccgccagtcgtgccaggccataatagccaccggctttgctgttgccgctccagaccgcacgccagaaatcctcttcggcttgttgatattgtccctgacgttcgtaagcactggcgcgaatcaaactcgcctgtccgcactgcggatttttgttcagcgcatgtgcgcgtttcagagcctgagtggcatacgccaccgcttgcgggaaatctgcgcggttatattccagcatcgccagcgccaggttacagcgataatccagcgggtccagcgccacgccgcgcaggtagtaatcgaacggactacggctggcgtgatgatattgctccagatgctgaccgataaaccaggcttcatctgtactggtaatgtcttgtgctgccagtggcgctttggcgacgtccggtaacggcaacgcttgcggctgatgttcctgataactcagtacaatattgccgtcggcatcggagagctcaatggtcagcctttcaggattgataccgtgcaacacgccctggatggcggtcgcaggcatcagtgccacggcatcatcaagtaacgcgttgcatttaccgatttcgcggatcgccaggcggtatccgttcaacggagagatggcatacagcccccactcaatcccccgcttactacgctggagttttatcaccgcatcgcgggaggcattttgcaccatgcccaaagaatgataaggcaggaaatactgctcaaaacgcttctcttcgtaagcatcaagccaggtaaaatcgggctggttatcggcaaaaataccggtcatcagttcgatatacgggccgttattgtcggtcagactcttatcccacgcctggccaaattcactgtgtccccaactccactgttttttacctggcgcaatatggtggttggcaacgtgcagcaaaccgccatcttcatcgtgacaccacgcgccgacaaaatcgtactggcttttttcggccatataactggttggaacaggcacatttttatagcgagaaatgtccactccagcggagtagtccactttgtagtaagtgccggtagcgatggggaaagcggagacggcccgtttgccgtgatcaaacaccgccgttacatccggcgggaagacgctctgatgcccttccccccctttcactgccgggttggcccaccacaagaaatgacgcggcgtggcgttcccgttatagacgcggctggcgatttccagcgccgcccggtcagggcgcagggtgaaacctgtcatcacctgtaaaccatgcatcggctccgtttcgcctacccacaccgtctgtgcaccgtcttcatgggcttcgagggtgaaatcaacgggcataaaggtggtcgggcgatgatgttgcggccagttaaactcaatcccaccggaaatccacggccccagcagccccaccagcgcaggtttaatgacttcattgtgataaacaaaatcgcgctgtttcactttatcccacgcgcgatgcacccgaccgcccagttccggcaggatcatcactttgatgtagtcgttttccagccacaccgcctgccaggatttcagggttttctgctcgctcagcgtatcggtcacgccgtagggataaaccgcgccggagcttccctgataaacgcgattttccaggaacatgggatgtatatcctgcggcccggtttcataggtcgggatctcaacgcgctcttgccacacttttactggagtcatggtgccctcaatattaacaagacatactgaattaaaagatttgtggcagtgtattgaacaatctggcaatgttttcgcggaataatcacgcaattaactaaacaaggtttagtgaagatgagagcctgcattaataatcaacagattcgccaccataacaaatgcgtgattctggaactgctgtaccggcaaaagcgcgccaataaaagtacgctggcccggctggcgcaaattagcattccggcagtcagtaatattttgcaggaactggaaagcgaaaaacgggtggtgaatattgacgatgaaagccagacgcgcgggcatagtagcggtacatggctgattgcgccggaaggtgactggacgctgtgcctgaacgtgacgcccaccagtattgagtgtcaggttgctaatgcttgtttaagtccgaaaggtgaatttgagtatttacagattgatgcaccgacgccgcaggcgctgctgtccgaaatcgaaaaatgctggcatcgccaccgtaaattgtggccggaccataccatcaacctggcgttggcaatccacggtcaggttgatcctgtgaccggcgtgagccaaaccatgccgcaagcgccgtggacaacgccggtggaggtgaaatatctgctggaagagaagctcggcattcgggtgatggtcgataatgactgcgtgatgctggcgctggcggagaaatggcaaaataatagccaggaacgggatttctgcgtgatcaacgttgattacggcattggcagcagcttcgtgattaacgagcaaatttatcgcggcagtttgtatggtagcggacagattggtcacaccatcgttaatccggatggcgtcgtctgcgactgtggacgttatggctgcctggaaactgtcgccagcttaagcgcattaaaaaaacaggcgcgggtatggctaaaaagtcaaccggttagtactcaacttgatcctgaaaaactgactacagcgcagttaatcgctgcctggcaaagtggagaaccgtggatcaccagctgggttgatcgctctgccaatgccattggtttgagtctgtataacttcctcaacatcctcaatattaatcagatttggttgtacggtcgcagttgtgcctttggtgagaactggcttaatactattattcgccagacaggatttaacccgttcgaccgcgacgaaggaccgagcgtgaaagcgacgcaaattggctttgggcaattaagccgcgcacaacaggtgctgggaattggctatttgtatgttgaggcgcagttacgacagatttgatggcgcgataacgtagaaaggcttcccgaaggaagccttgatgatcataaacgaaaaattgcctgatgcgctacgcttatcaggcctacacggagattgcaatatattgaatttgcaaagttttgtaggccggataaggcgttcacgccgcatccggcatgaacaacgagcacattgacagcaaatcaccgtttcgcttatgcgtaaaccgggtaacgtgcgcagatgtcgagaactttacctttgatgcgctcgataacggcttcatcattgatgctgtccagcacgtcacacatccagccagccagttctttcgcttcggcttctttaaagccgcgacgggtaatcgccggagtacctacacgaataccggaggtcacaaacgggctcttcggatcgttcggtacgctgtttttgttgacggtgatgttagcacggcccagagcggcgtctgcttctttaccggtcaggtttttatcaaccagatcaaccaggaacaggtggttatcagtgccgccggaaaccactttgtagccgcgctcgaggaacacttctaccatcgctttagcgtttttagcgacctgctgctggtaagttttgaactcaggctccatcgcttctttcagagcaaccgctttaccggcgattacgtgcatcaacggaccgccctgaccaccagggaaaacggcagagttcagttttttgtacagctcttcgctaccacctttcgccaggatcaggccgccgcgcggacccgccagggttttgtgagtggtggtagtaacaacgtgagcatgaggaaccgggttcgggtagacgccagcagcaaccaggcccgcaacgtgcgccatatcaacgaacaggtaagcaccgatgctgtcagcgatttcacgcattttcgcccagtccaccacgccggaatatgcagagaaaccaccgataatcattttcggcttgtgttctttggcttgtttttccagatcggcgtagtcgatatgaccggtagcatcgataccgtaaggaacgatgttgtacagtttaccggagaagttaaccggagaaccgtgagtcaggtgaccgccatgcgccaggttcatacccagaacggtatcacctggttccagcagcgcggtgtagaccgcaaagttagcctgggagccggagtgcggctggacgttagcgtagtcagcgccgaacagttctttcgcacgatcgatcgccagttgttcaacgatatcaacatactcgcaaccgccgtagtagcgtttgcccggataaccttcagcatatttgttggtcagctgagaaccctgcgcctgcattacgcgcgggctggtgtagttttcggaggcgatcagttcgatgtgctcttcctgacgtactttttcctgctccatagcctgccacagttcggcatcataatcggcaatgttcatttcacgctttaacatccgcatctcctgactcagctaacaataaaatttttggcctttataggcggtcctgttggacaacggcgaacagtataaccgaatcattgtgcgataacaggtcttgacaaaggaatttacgcaaacgattaccttcaggctacgcaaggctttggagaataaagagcttgcaaccggaaacggatttcttttcaggtttgtgatgcaaatttttcacttcatcacattctttctgaaaaacaccaaagaaccatttacattgcagggctattttttataagatgcatttgagatacatcaattaagatgcaaaaaaaggaagaccatatgcttgacgctcaaaccatcgctacagtaaaagccaccatccctttactggtggaaacggggccaaagttaaccgcccatttctacgaccgtatgtttactcataacccagaactcaaagaaatttttaacatgagtaaccagcgtaatggcgatcaacgtgaagccctgtttaacgctattgccgcctacgccagtaatattgaaaacctgcctgcgctgctgccagcggtagaaaaaatcgcgcagaagcacaccagcttccagatcaaaccggaacagtacaacatcgtcggtgaacacctgttggcaacgctggacgaaatgttcagcccggggcaggaagtgctggacgcgtggggtaaagcctatggtgtactggctaatgtatttatcaatcgcgaggcggaaatctataacgaaaacgccagcaaagccggtggttgggaaggtactcgcgatttccgcattgtggctaaaacaccgcgcagcgcgcttatcaccagcttcgaactggagccggtcgacggtggcgcagtggcagaataccgtccggggcaatatctcggcgtctggctgaagccggaaggtttcccacatcaggaaattcgtcagtactctttgactcgcaaaccggatggcaaaggctatcgtattgcggtgaaacgcgaagagggtgggcaggtatccaactggttgcacaatcacgccaatgttggcgatgtcgtgaaactggtcgctccggcaggtgatttctttatggctgtcgcagatgacacaccagtgacgttaatctctgccggtgttggtcaaacgccaatgctggcaatgctcgacacgctggcaaaagcaggccacacagcacaagtgaactggttccatgcggcagaaaatggcgatgttcacgcctttgccgatgaagttaaggaactggggcagagtctgccgcgctttaccgcgcacacctggtatcgtcagccgagcgaagccgatcgcgctaaaggtcagtttgatagcgaaggtctgatggatttgagcaaactggaaggtgcgttcagcgatccgacaatgcagttctatctctgcggcccggttggcttcatgcagtttaccgcgaaacagttagtggatctgggcgtgaagcaggaaaacattcattacgaatgctttggcccgcataaggtgctgtaatttgatgttgccggatggaaacatccggcaacccttgacgcggtttaaattgccgcgtcgtcctcttcaccggtacggatgcgaatgacccgtgccacgtcaaagacgaagattttaccgtcaccgattttgccggtttgcgccgtgcgaataatggtatcgacacaggtatcgacaatgtcgtccggtacgacaatctcaattttcactttcggcagaaaatccaccatatactccgcgccgcggtacagctcggtatggcctttctggcgaccaaagcctttcacttcggtcaccgtcatgccggtaataccgacttcggccagtgcttcgcggacatcgtccagcttgaagggttttataatcgcatcaatctttttcatgctattccttgaaaaggtcgcctgtcttttgatctgctaaacgtaacacataacgccaattcattccttgaaatcgtttgcatccagctcgtgtcgggaaagcagtttataaaattctgtccggttgcgccccgccattctcgccgcgtgggtgacgttgcctttggtgatttgcagcagcttacgcaaatagttgagttcaaactgattacgtgcctcaacaaaggttggcagcgccgtattttcaccctccagcgcctgctccaccagcgcatcactaatcaccggagaactggtcagcgccacgcactgttcaatcacgttgaccaactggcgcacattacccggccagctcgcggtcatcaggcgtttcatcgcatcggtagagaacgcgcggacaaacggtttatgtcgctctgccgcctggcgcaacaggtgatttgccagtagcggaatgtcttctgtgcgctccgccagtgccggaattttcaggctgacaacgttgaggcggtaatagagatcttcgcggaattccccgcgcgccatcgcttttggcagatcacggtgagtggcagaaataatccgcacattgatatcaatatcgcggttactgcccagcgggcgcactttacgctcctgcaacacgcgcagcagtttgacctgtaacggcgcaggcatatcgccaatttcatcgagaaatagcgttccgccttccgccgcctggaataaaccttcgcgattgctgacagcgccagtaaacgcgccacgcgcatgaccaaacagctcgctctccagcaattgctcgggcaatgcgccacagttaatagcaataaatggtttgctgttgcgcgggctggcgttgtggatagcctgggcgaaaatctctttcccggtgccgctctgaccgttaatcaaaacgctgacgtcactttgcgccaccagccgcgcctgttccagcaaacgcagcatcagcgggctgcgggtgacaattgcctcgcgccagcgttcatcggtggctggcgcggattgctccagcgcatcgtcaattgcctgatatagcgcgtctttgtcgacaggcttggtgaggaaactaaaaacgccctgctgtgttgcagcaacggcatcgggaatagaaccatgcgcggtaagaataattaccggcattcccggctgcactttctggatttcagcaaacagctgcataccgtccatttcatccatccgcaggtcgctgatgactaaatctactttttcgcgattcagtacccgtaatccttcagcgccactttccgccgtgaccacactgtagccttcgctggtcaggcgcaggccaagcagtttcagcaatcccggatcgtcatcgaccaataataaatgcgcaggtttatggctcatcaggagtgacctcatgggtggatggcgcgggcttttcactctcgtgcggcgtatccgggctgaaatttccagccggtttgcgggtgctgagctggcgttcaatatcggtcaggttttccagcttgcgggtggtgagttccagttgctgctgtagaacgtgatgttgctggcgcaatgtatccagctcgctgtcgctggactgctggagtttactgtaacgttggcgctcttccgccagttgcagttgcagcgcctgaccatcgcgccagagttgatacagtgggcgaacctgtgccgggatctcggtacttaacgcttcaatacgcgcgaccagctggcggcgctcatacggcgtaattttggcgtcggcgagcaaaatcccttgtttaaaggtattttgccagctgccgtcgtcatattggcgagcttgctgacggctctgcgcaggcattaaacgatcagcacaatccatcgcccgcagccagtaaagcggattggtttcggtacttttaccttgcagcgcccagatgtcgctacattcagtagaaagatagtcagccagttgataaaccggaattttttcttctgctggcgtatcaatggctggcttattgtgattctgcacgcaacccagcaatgccagacatggcagccctgccagccacagccgtcggggcaataatcgttgaaaaatgtgtcgcatattcaccagacttaaagcctatcccagtgggcgtaattgttgcagacagtctggacatggacagcgcggagaaaccggagcgtacatatcgtacgtgaagatttcgagcactgcccggggccgaactgacaaataaaatagcctgataggataggctgttagcattatttcgtgtttttgctgctcggtaattcaatgcggaaacaaacgtcttgcccgctctcgtcgaccagatacagttccccttgcatacggcgaatacaatccctggcaatgcttaatcccagaccgctgcccttcaccgccccttttcgctggtggcttccctgaaaaaagggttcgaagatcatggcgcgttcctcttgcggaatgggcgtgcctgtattgatgacatcaatataaacccgcgcaccatgtaaactgctgcgaaggcaaatgttaccggattcagccccgtagtgcaccgcattggagtaaagattatccagtacgctcatcagcagcattggctccgccaggcaagctgttgctttgagatcgacgtcggtatgcatcattttagcccgtgcgggcaggctatgagcagaaaccactgtctccaccagcggtgctaactcaacattctccagttccaccgcactgtccgcctgtttacggttgtaatcaagcagttgttcgatcagtttttgcaaattgcggctgctgctatcaagaatgctcaccacctctttttgctctggcgtaagcggcccgacaacctggtcagccagtaattcagtgccctcgcgcatactcgccagtggcgtttttaattcatgagataaatgtcttaaaaattgatggcgttgggattccagccaactcaggcgctcacttaaccaaagaatacgttgcccaacgctgcgtaactcgctcggtccactgaagctgacgctattgcccagagaacgcccttcccccagacggttgatcatgcgctcgatatttttcaccggcccgataatcatccgcgtgaaaagcagtaccattaccagactcaccagaaatagcaccaggctttgccaaccaaaatattgcccacgttcggcgatttcacgctgaagctgctgcccacgagagaacaccactgtgcgcgtggcctgtaccatttcggtattggcactggcaaaggcttcaagacgtgcggcggcggcagcatcgggaccgctgttgttacactgaagttgagccagattgtgcaaatcctgacgtaatgcctggtagagtttatcgtccggcagcacgcctgcgtgggcatcgagcatttcgctgtaacgcttgcgctggctttgataaaccttcgccagggttgggtcgtccagcacgcaatactgacggtaactacgctccatctccagcgccgcgttggtcatcgcttcactgcgccgggcatcaataagcgtagtgcggttaaccagcgccgcctgatcgctaagcgcattcaggctttgccaggcttgccatgccagcaccaacaggggcagcagaatcagcaaaaatgccagcattaccagttgtcgtaaactgcggggaaaaacgggccagcgtttcaaggtgttactctcgtcagacgcgaatagcctgatgctaaccgaggggaagttcagatacaacaaagccgggaattacccggctttgttatggaataaggcggtgcctaactcgacgtttcgcccgatggttgatatagctacgctgatatcagaagttggacggcaggcaccttgttgtgcgtcattcgtattttatgtagcacgtcccgaaggggctgacataagtcggtgaatgagccactggttactattatgcagtaactgtgccaataaagaaaatagtttggtaacgtactgattatacgttgctttgaggggtttatgtctcctccgctgtttgaatgtaaatcagccactgtgtcgctaaaaagagacaacttaagataaacttattagataatattaaaatcaatgagttaagtgtcgccagaaagcgacacggcaaaccacccattgtcgtgatttacagacacaaaaaagctcccggagttgggagcttatgatagtggttggtgcttaatgccgcatccgggctgcaaaaccaatgggctgacgacttaccccaactgcttacgcgcattgcggaaaatgcgcatccatgggccatcctcgccccagttttccggatgccaggagttgctgacagtacggaaaacacgttccgggtgcggcatcataatggtgactcgaccactttcagtcgtgactgccgtaataccgttcggactaccgttcgggttagccgggtaggtttcagtgactttgccgaagttatcgacatagcgcagtgccaccagccctttgctttccagtgccgccagatgcgccgcatcacgcacttccacgcgcccttcaccatgagagacagcaatcggcatttggctgcccaccatcccctgcaacagcagagacgggctttgggttacttcaaccaggctgaaacgcgcttcaaagcgatcggaggtattgcgcacaaaacgtggccacaactcactacctgggatcagttcacgcagattagacatcatctggcaaccgttacatacccccagcgccagcgtttgcggacggtggaagaaggttgcaaactcatcgcgtacacggtcattgaacaggatactcttcgcccaaccttcaccggcacccagcacatcaccgtaggagaaaccaccgcacgcgaccagggcgtggaaatcttccaggcccgtgcgtccggtcagcaggtcactcatatgcacgtcgatagcatcaaagcctgcacggtggaaagctgccgccatttcaacatggctgttcacgccctgctcacgcagtacggcaactttcggacgtgcgccagtggcaatatacggtgctgccacatcttcgttgatatcgaagctcagttttacattcaggcccggatcggcgtcgttagatttcgcctgatgctcctgatcggcacactccgggttgtcacgcaggcgctgcatctgccaggtagtttctgcccaccagacacgcaacgtggtgcggctttcgctgaatacagtctgcccgttggcggtaatcacaaaacggtcaccggaaaccgcctgccctacataatggacacaatcagcaagcccatgctgtgccagtacggactcgaccgcttcacggtcagcggcacgaacctgaatcaccgcacccagttcttcgttaaacaacgccgccaggcgatcgtcacccagagtggcgatatccgcgtcaatgccacaatgaccagcaaaggccatttccgccagcgttaccagcaggccgccatcagagcggtcgtgatacgccagcagcttacgctgtgcaaccagcgcctgaatcgcgtcatagaagcctttcagttgcgcgacatcgcgtacatctgccggtttgtcgccaagctgacgataaacctgcgccagcgccgttgcgcccagcgcgttattgcctttgcccaaatcaatcagcagcagtgcgttatcttcggtagaaagctgcggcgtgatggtgtgacgtacatcttccacgcgggcaaatgcagaaatcaccaggctcagcgggctcgtcatttcgcgctcttcgttaccttcctgccagcgggttttcatgctcatggagtctttacccaccgggatcgtcaggcccagcgccggacaaagctcttcgcccacggctttaacggcttcatacaggcccgcatcttcaccagggtggcctgccgccgccatccagttggcggaaagtttgatgcgtttgatatcgccaatttgtgttgcggcgatgttggttaacgcttcaccgaccgccagacgggcagaggcggcgaaatccagcagcgcaaccggcgcacgctcgccaatcgccatcgcttcaccgtagtagctgtcgaggctggcggtagtgaccgcgcagttagcgaccggcacctgccacggccccaccatctgatcgcgcgctaccatgccggttacgctgcggtcgccaatggtcaccaggaaggttttttccgccacagtcggcagatgcagcacacgtttcaccgcgtctgcaatggtgatcccttcacgggccagcgcgtcgcctttcgctttcagcgtttgtacatcgcgggtcatcttcggcgttttaccaagcaggacgtccagcggcagatcgatcggctgattatcaaaatgacgatcgtgcagagaaagatgcagttcttcggtcgcttcaccaatcaccgcgtagggtgcgcgctcacgcttacacagttcgtcaaacagcggtaattgatcggcagcaaccgccagcacgtagcgttcctgggattcgttacaccagatttccagcgggctcatgcccggttcgtcgcttagaatctcgcgcagttcaaatttaccgccgcgcccgccgtcgctcaccagttccggcatggcgttagaaagaccgccagcgccaacgtcgtggataaacaggattgggttggcatcaccaagctgccagcaacggtcgatcacttcctggcagcgacgctccatctccgggttgtcgcgctgtacggaagcaaagtcgaggtcggcatcagactgaccagacgccatagaagacgctgcaccaccgccaagaccgatgttcattgccgggccgccgagaacgaccagcttcgcaccgacgttgatctcgcctttttgtacgtgatcggcgcgaatgttgccgatcccgcccgccagcatgatcggtttgtgataaccgcgcagctcttcgccgttgtggctgttcactttttcttcataagtacggaagtagccgttcagtgccggacgaccaaattcgttgttaaacgccgcgccgcccagcgggccttcggtcatgatgtccagcgcggtgacaatgcgctcaggcttaccgaaatcttcttcccacggctgttcgaagccaggaattcgcaggttggaaacggagaaaccaaccagacccgctttcggctttgcgccgcgcccggtggcaccttcatcgcggatttcaccgccggaaccggtcgccgcgcccggccacggagaaatcgccgtcgggtggttgtgagtttcgactttcatcagaatatgcgccggttcctgatggaaatcgtagcggcccgtttcgtggtcagcaaagtagcggcccacttcagaaccttccattacggcggcgttatctttataagcagagagaacgtgatctggcgtggtttcgaaagtatttttgatcatcttgaacaggcttttcggctgctgttcaccatcgataacccagtcggcgttaaaaattttgtggcggcagtgctcggagttcgcctgggcaaacatatacagttcgatgtcgttcgggttacgaccaagctttgtgaaagcatcctgcagatagtcaatttcatcttccgccagagccaagccaagacgcaggttagcgtcgatcagcgcctgacggccctgccccagcaaatcaacgctggtaaccggagtcggttgatggtgggcaaacaactgctctgcatcatctaaagcaaaaaagaccgtttccatcatgcggtcgtgcagttcagcggtaacctgctgccattgttcattggtcagcgtaccggcttctatatagtaagcaacgccgcgctcaaggcggtttacctgttgtagcccgcagttatgggcaatatcggtcgctttgctagaccagggagagatggtgccaggacgcggggtcaccagcaggagtttgccttgcggggcgtggctggcgagtgccgggccatatttcagcaggcgttcaagttgtgcgtgctcatcatcgtttaacggcgcattgaggtcagcaaaatggacatactcggcgtaaatattgtgaaccgggagcctggcagcctgaaaacgtgccagcagtttgttgattcggaatgcgctcagtgcagggctaccacgcagaatttccatcataagtctctcgtcttctaagctttcggtgtacccaagggggggaaacgggcgtcattataaagaatctgatgcgctgacgaaaccgtttgcgtggaaataaaatcaccatcgtgaattagcaacgcgtgccgccaatggctgtaataagttgccatctggcgcaggtttacgcaaaatgccgctcatttatgagtaaacctttcactattattacgttttttcaagctgggacgcgcacgacacagagaattaactaattgaaaaaattaaagattaattatctgttcatcggcattctggcactgctgctcgcggtcgctctctggccatccattccctggtttggtaaagccgacaaccgtatcgccgccattcaagcgcggggagagttgcgtgtgagcaccattcatactcccctgacttataacgaaatcaacgggaaaccttttggcctggattacgaactggcgaaacagtttgccgattacctcggcgtaaaactgaaagtgaccgtgcggcagaatatcagccagctgtttgacgaccttgataatggtaacgccgacctgctggcggcaggacttgtctataacagtgagcgggtaaaaaattatcagcctggccctacctattattccgtgagtcaacaactggtttataaagtgggtcagtatcgcccacgtacgctgggcaacctgacggcggagcaactcaccgttgcaccgggtcatgtggtggttaacgatctccagaccctgaaagaaacaaaattcccggaattaagctggaaggtagacgacaaaaaaggctctgcggaattaatggaagatgtcatcgaaggaaaactcgattacaccattgctgattctgtcgccatcagcctgtttcagcgcgttcacccggagctcgccgtagcgctcgatatcaccgatgaacaaccggtgacttggtttagcccgttagatggcgataataccctttccgccgccctgctcgacttcttcaacgaaatgaatgaagacggtacgctggcacgcattgaagagaaatacctggggcatggcgatgattttgattacgtcgatacgcgcacatttttacgcgccgtcgatgcggtactgccgcagttaaagcccctgtttgagaaatacgccgaagaaattgactggcgtttgctggccgctattgcttatcaggaaagccactgggatgcacaggccactagtccgacgggtgtgcgcggcatgatgatgttaaccaaaaataccgcgcaaagcctcggcattacggatcgtaccgatgccgaacagagcatcagcggtggcgtgcgttatttgcaggatatgatgagtaaagtgccggaaagtgtgccggagaacgagcggatctggtttgccctcgctgcgtacaatatgggctatgcgcatatgctggatgcccgcgccctgacggcaaaaaccaaagggaatcctgacagttgggctgacgtaaaacagcgtctgcctttacttagccagaaaccctattacagcaagctgacttacggctacgctcgtggacatgaagcctacgcttatgtcgaaaatattcgtaagtatcagattagcctggtgggttatctgcaagagaaagagaagcaggctacagaagcggcgatgcaactggcgcaggattatccggcggtaagccctacggagttgggcaaagagaaatttccttttctcagctttctttcccagagcagtagtaactatttgacccattctccctctctgctgttttccaggaaagggagtgaagagaaacaaaattaatccgtgctggattgcgcttttttctgcgctttaatttcctggcggcgcatgcgaaagaagtcactgagcaacgccgcgcactcatccgccagtattccttccgtaatttccactcggtgattcatacccggatgatgcagcacatccattaaagatcccgcagcgccagttttcgcgtcacgcgcaccaaagaccacgcgaccaatgcgactgtggatcatcgctccggcacacattacacatggttcaagcgtgacatacaacgtggcgtcgatcagacgataattttgcatcaccagaccaccctgccgcagggccatgatttctgcatgtgcggtgggatcatggcgaccaatcgggcggttccagccttcgccgattacccgattgttatgcactaataccgcgccgaccggcacttcccgctcatcccaggcacgtttcgccagcgtcagcgcgtgacgcatccagtattcgtggctaaattcgacttcagacaaaaagaaaactccggttataaaagcgcggcgcattatacacggacgctatgctttactttattccagttgctggagttcaccgcgcggggttactcgccaacgatgctgacagaaataaagcagcggattgtcctgattactgtcgctatagccactgtacagccgcagcggagtgccgattttgcgctccagttgtgcgaccttttcatgtcccagacaacgcatcgtcaatacccaaccaccatagccacgctgaatttggctggcgataagattaacccgcggcagccagggcgtatcgaaataaaccgcttcaaccagcggctgcggagagccggtaatcaaccagatatcagcatcggaacttaacaggtaggtggttaatcgctcctgaaccagcggaaaggcggtaacattgtcgcgaaaccagcgcacgaaatcggcctgcaacgtctgtaaacgtgcttcgctgtgaccaaaagtgcacccccacagaagcagactcatcggccagcgtgccgcacgaccttttatcaataacgcaatggctataatcggtaacaacggcaggacaagtaacgcattcagcggttggcgacgtagtaaatagcgcagaaaactgccgaacatatcctgctgatgcaatgttccatctaagtcaaaaaacaccacacgacgctcgtgagttgccaaaccatattcctctggactgaaacatcctgattaattttcgctactacatagcctaacagatagatcatcacttttccggcaacaatcgaccgcatcatggctaactggaatttttaattcatggcaattagcggcaatggaatataaaattcactcgcgtgtgtctcatattgcctgttgtcgccactatttcatcgcgaggaaagatatgaacggcttacttcgtatccgtcagcgttaccaggggcttgcccagagtgataaaaaactggcggattatctgctgctacaacctgatacggcgcgccatttaagctctcagcaactggccaacgaagccggagtcagtcagtccagcgtcgtgaagttcgcgcaaaaactcggctataaaggttttccggcgcttaagttggcgttgagtgaagcgctggcaagccagccggaaagtccctccgtgcccattcataaccaaatccgcggtgatgatccgttacggctggtcggcgaaaaactgattaaagaaaatactgccgctatgtacgcaacgctaaacgttaatagtgaagagaaactgcatgaatgcgtaacaatgttgcgctctgcgcggcggataattctgaccggtattggcgctagcggtctggtggcgcaaaactttgcctggaagctgatgaagattggcttcaatgctgccgcagtgcgcgatatgcatgcgctactcgcaacagtacaggcgagctcccctgacgatctgttattagccatttcctacaccggtgtacgacgcgagttaaacctggcggcagatgagatgctgcgagtgggcggaaaagtgctggcgattaccggctttactccgaatgccctgcaacagcgtgcttctcattgcctgtataccattgccgaagaacaagcgacaaacagtgctagtatctctgcttgtcacgctcagggaatgttaacggatttgctgttcattgcgctgattcagcaggatctggaactggcaccagaacgtattcgtcatagtgaagcgctggtgaaaaaactggtctgagtaaagaatgcgcgtataatgcccgcccggtttgtgttgttttgagagtttccttatggcgttgttaatcactaaaaaatgcatcaattgtgatatgtgtgaacccgaatgcccgaatgaggcgattagtatgggagatcatatctacgagattaacagcgataagtgtaccgaatgcgtagggcactacgagacaccaacctgccagaaggtgtgcccgatccccaatactattgtgaaagatccggcgcatgtcgagacagaagaacagttgtgggataaatttgtgctgatgcaccacgcggataaaatttaatattctactctggaagtagagtattaattatattactgggaagccttaacgccattatatttatttaattgatgacattagcataatcattcactaagttaatttatatagtatctgcccagacacttatttatagttattaaaggtgcgtccgactggttcaccggacgcaccttaagtacgtttccttgtgttataagaacagaaggatcagctgtaaaacagcaatgatgattttgatgacccgtttaatcaggtatcggcaatcagtcattcgtttttccttaaacaaggaatgcagccattcagattagcccttacatctccccaaaactgaacgtgcgagttattgagggtgcatgctgcactccacaccagagctttgacgacaccactcgtttcaatgggggaattctgtggcatggtgtaaagcacagcaaaatcttcaataacgaagccaattttaatgtacttacgaattggcggtcacgttaatctttccatcaatattgctttcttcgtaaaggctcgagtttttatgctaaagattgcaagttgcttgtaaaagataagtacactgatccataatcgctgttgttgagggtgcatgctgcacaaaattaaagttaaaaagtaaaacccccgttccttaccagttcgggggttttactttttaaagagaacggtattatttttaactttcaataattaccgtggcacaagcatagtgccgctcatctgccagcgttacatgcatatttgcaacgcccagcttttccgccagttttaatgcctcgccccatagccgtagccgtggtttgccgagctcatcattgaatacttcaaattgattaaacgccagaccattgcggatcccggtgccaaacgcttttgctgcggcttctttcacagcaaaacgcttcgccagaaaacgcaccggctggtggtgcgttttccagatagcccattcgttatcgcttaatacgcggcgtgccaggcgatcaccggatcgggcgatcaccgcttcgatgcgagcgatctccacaatatccgtgcctaaacctaatattgccattagccacgcgcttccagcatcagacgcttcatttctgccaccgcatctttcagtccggtcatcactgcacgaccaataatggcatgaccgatattcagttcatgcatctcagggatggcggcaatggctttcacgttgtgataggtcagaccgtgtccggcgttaactttcagaccgaggcttgcggcaaaggtcgcggctttggcgatacgcgccagctcttgcgcctgttcggcgtcagttttggcatcagcatagcaaccggtgtggatctcgataaacggtgcgccaacctctgccgcagctttgatctgctcttcatcggcgtcaataaacagagaaacctgaatcccggcatctgccagacgtttgcaggcatcgcgcattttgtcacgctgccctgcgacatccaggccgccttcggttgttacttcctgacgcttttccggtaccaggcagcaaaaatgtggcttcgtctcaacggcgatcgccagcatctcttcggtcaccgccatctccagattcatgcgggtatccagcgtctgacgcaggatgcgcacgtcgcggtcagtaatgtgacggcgatcttcacgtaaatgcacggtaatgccgtccgctcccgcctgctcggcaataaacgcggcctgcaccggatccgggtaagcggtaccgcgcgcgttgcgcagcgtagcgatatggtcaatgttgacgcctaacagtaattcagccatgacaatcctcatcattcataatgtgttttcaccgttcgcttaggcataaactgccggaacagttccctgctctttaaaggtttaccgccaagatacggcttaagcgccatgcgggtaaagcgtttcgcggcgcgcagtgtgtctgcgtcaggaaattcccgtgcgtttaacgcttttaactgccttccggtgaacgttttattgtcgataacgacgcttgcgataaaccctttttcttcgcgataacgatacgtcatggtgtcatctaccggctcgccgctacccgcacaatgggtaaaattgacgccataacccagatgcccgagcagtgccagttcaaagcggcgcagcgcgggttctggcgtaccagtgacccctgcaagagactgaatgcagtgcaagtaatcgaaaaaaagttcagagaagcgcgtctcgtattccagtacgcgggagagaagttcgttgatgtacagaccgctgtaaagcgtgataccgcttaatggcagcgccaggctgacggcttcagcactgcgcagcgttttgacttcgccacgcccgccaaaacgtagcaagagaggggtgaaaggctgtaatgcacctttcagggtagagcgtttagagcgtgcgcctttggcaaccagacgcacgcgcccgctttcctccgtgaagacgtccagcatcaggctggtttcgctccacgggcgactatgcaggacaaatgcgcgctgccagccttccatcggagttactcttaaagatcgtcaacgtaaccgagactgcgcagtgcgcgttcgtcgtcggcccaaccggatttcacttttacccacagttcaaggtgaacaggcgcttcgaacatttcctgcatgtctttacgcgcttcaatcccgatggttttgatcttggcccctttgttgccaatgaccatcttcttctgcccttcacgctcaacgagaatcaaaccgttgatgtcataaccaccgcgttcgttagagacgaaacgttcgatctccacggtcacggagtacggcagttcagcgccgaggaaacgcatcagtttttcgcggatgatttcagacgccataaaacgctgactgcgatcggtgatgtaatcttccgggaagtgatgagtcgcttcaggtagatgcttacgcacgattgccgcaatagtgtcaacattcagcccggtttcggcagagattggcacgatatcgaggaagttcatctggcttgccaggaactgcaggtgcggcagcagatcggctttctcctgcacgttgtccactttgttcaccgcgaggattaccggcgctttgccttcgcgcagtttgttgagcaccatttcgtcgtccggcgtccagcgggtgccttcaacgacaaaaatcaccagctcaacatcgccaatagagctgctcgccgctttgttcatcaggcggttaatggcgcgtttttcttccatatgcaggcccggtgtatcgacgtagatcgcctgatacgcgccttcagtatggatccccacaatgcggtgacgagttgtctgcgccttgcgggaagtgatggagattttctgccccagcagtttgttcaacaatgtggatttgccaacgttcggacgtccgacgatggcaataaatccgcagtaacttttatcgatgctcattccagctccagttttttcaacgcctgttcggcggcagcctgctcagccttacgacggctactacctgtgccaaccaccggttcactcaggccgctgacctggcagtggatagtaaattcctgatcgtgcgcttcgccacgtacctggactaccagataagtcggcagcggcagatggcgaccctgcaaatattcttgcaagcgcgttttcggatctttttgtttatcgcctgggctaatttcgtccaaacgagtttgataccagttgaggattaatttctcgacggtttgaatatcactgtcgaggaatacgccaccaattaatgcttcgacggtgtcggcgagaatactctcacgacgaaatccaccgcttttaagttcacctggccctaaacgtaagcactcgcctaactcaaattcgcgcgccagttccgccagcgtattgccacggaccagcgtggcgcgcatccggctcatatcgccttcatccacacgagggaaacggtgataaagcgcattggcgataacgtagctcagaatagagtcgcctaaaaattctaaacgctcgttatgtttactgctggcactacgatgagttaatgcctgctgcaacagttcctgatgattaaaagtgtagcccagcttccgttgaagccgattaattacgatggggttcatgcgataccaataaataaatgcgtcaacaattcagcacacgaaacagacctgatatacatggttctgctaactgcttcgctgcagtttcagtttaccggtatatggggaccaacgctgtttcgtgtgccgtggcaacctggaggtgccaaccttaaacttcgggggaatattctatacacaacgacgggggatgtcgttagccacgggagatttatctcataaataattcacgttgtcgccataacggcgacaacgtgaacgaagatggctattaatggatgccgccaatgcgacttaagcgcagaccagtcggccattcgccttcttgcttatcgaagctcatccagatagccgttgcccgaccgaccagattcgcttccggcacaaagccccagtaacggctgtccgcgctgttgtcgcggttgtcgcccatcatgaagtattgtcccggaggaacaatccaggttgccagttgttgccctggctgctggtaatacatccccacctgatcctgcgcaatcggcactgtcagaatgcggtgcgtcacatcacccagtgtctctttacgctcggaaagacgaattccattttctttggtttcgtttttcggcacttcaaagaatccgctggtcgcttccccaccattacggcgactgaaggtctgaacgaaatcgctcggttccacgttactgtaggtgaccggcagcgcgttttcacacgcctggccggaactgcatcccggttgaatcgtcagctctttactgaccggatcgtaagtgactttatcgcccggtaaacccaccgcgcgcttgatgtaatcaagctttggatcttccggatatttaaagaccacgatatcgccgcgtttcggatgaccggtttcgatcagcgttttctggtagataggatctttaatgccataagcaaacttctctaccagaataaaatcaccaattaacagagtcggcatcatgctaccactcgggatctggaacggttcataaataaagctacgcacaatcaatacgatagccagtaccggaaaaacagaagcaccggtttccagccagccaggcttcggcgcaacctttttcaacgttgctttatccagactgtccccggcagccgcctgcgccgctgcctgacgttcccgccgtttaggtgcgaaaaagaatttatccacgcaccataaaatgcccgtcaccagtgtggcaatcaccagaatcagggcaaacatattcgccatgccaactcctaagggttatttgttgtctttgccgacgtgcagaatggcgaggaacgcttcctgcggcagctcgacgttaccgatctgcttcatgcgtttcttaccttctttctgcttctgcagcagctttttcttacggctgatatcgccgccataacatttagccagtacgtttttacgcagctgtttcacggtggatcgcgcaatgatgtgcgtaccaatcgctgcctgaatggcgatatcaaactgctggcgtgggatcagatctttcatcttctccaccaactcgcgaccgcggttttggctattatcacggtgggtgatcaacgccagcgcatcaacacgttcaccgttgattaatacgtctacacgtaccatgtcggacgcctggaagcgcttgaagttgtaatccagagacgcataaccacggctggtagatttcaggcgatcgaagaagtcgagcaccacttccgccatcgggatctcgtacgtcagcgccacctgattaccgtggtaaaccatattggtctgcacgccgcgtttttctacgcacaacgtaataacgttgccgagatatgcctgcggcagcagcatgtgacactctgcaatcggctcgcgcagttcgtagatgttatttaccgcaggcagcttggatgggctgtcgacgtagataacttctctactcgtggtttcaacttcatacactacggtcggcgcagtggtgatcagatccagatcgtattcacgttccagacgttcctggatgatctccatgtgcagcaggccgaggaagccgcagcggaaaccaaagcccagcgcgctggagctttccggctcatagaacagactggcatcgttcaggctgagtttacccagcgcgtcacggaaggcttcatagtcgtcggaacttaccgggaacagaccggcgtatacctgcggtttgactttcttaaagccaggcagcgccttttctgccggattacgcgccagcgttaaggtatcgccgactggagcgccgtggatatctttaatcgcacatacgagccagcctacttcgccacatttcagttcagtgcggtcaacctgtttcggcgtgaagatgcccagacggtcggcgttataggtctgcccggtactcatgactttcactttgtcgcccttacgcagggtgccgtttttaatacggataagactaacaacgcccaggtagttgtcgaaccaactgtcgataattagtgcctgcaacgggccttccggatcgccttccggcggcggaatgtcgcgcaccagacgttcgagaacgtcctgcacaccaacgccggttttcgcactacagcgcaccgcgtcggtggcgtcgatgccgacgatatcttcaatttcttccgccacgcgttcaggatcggctgccggcaggtcaatcttgttcagtaccggcacaacttcgagatccatttccatggcggtgtagcagtttgccagggtttgcgcttctacgccctgcccggcgtcgaccaccagcaatgcaccttcacaggcagccaggctacgggaaacttcataggagaagtctacgtggcccggggtgtcgataaagttaagctgataggtttcgccgtcagacgctttgtagtccagcgtcacgctttgcgctttgatggtaatgccacgctcacgctcaagatccatggaatcgagaacctgcgcctccatttcacggtcagacaggccaccgcagatctggataatacggtcagacagcgtgcttttaccgtggtcaatgtgagctatgatgctaaagttacgtatattcttcataaagtatgattattgtgccttaatgcccggttaaccaggcttttagaagtcgctgttctgagcttaacgtctgtattaatagaaacgccgcattctacactacaacattgaggcgaggaaatgttcataccgtatggattgtggtatctggaaacgtcctcgcatttgttatgcaaaatgcaacaaagccagtgaaatcactggctcgcgtcttcgctagatgtttcaaatcgcacaaggccaggcggcaatgccacgcttaagatgatcggttgccattctgcccgggcagcaaacttacggctgtagccgcgcgcaatcaggaacccgccaataccaccgaggatcgcaccacataatgctgcgacgtcagaagcaaagagtagctgaaataggctagcgataaggaataatcccaccagcgggctcatataaaccagtaatgcggagctaagcaggctgccttcggcgatccccaattccactttttgccccggcactaacggctcatcacagggtacgacaatggtatgcgtggtttgcgggccaagtttatttaacacgcggctaccgcaaccggcgcgactagcgcagctgctgcaactagctttaacatcacaactgaccagcgcctgcccgttttgccaggagacgacggtagcccactctttgatcattgcgctgccccgaacttaatattctcggcaatgcgtttcgccgtttgcggcggcagttcaccgacaatggtgatttcggcgttatcacgtacgcttgtactgacggttctgcgtccggtgcgcaacatctgatcggtgctgcttggcgtagcgcggttaacgtttacgctgaagctgaataatccgtcggaatagagacgactttcgataggcatgttgtccatcgtcggtagcggacgtcgactactggaaacttcgctaaaaccctgtggcaaccaggttggcgtccagctgaatttagctttttcacctacaggaacagaaagcaacggcggcaaatttgccttcgccagcgtctgcatactgctgctgatatcctgattgacgttaaaagcaatcacgcgaaattgttccagcgtttcaccatcgcgatcaaggagatcaacccgcatcggtaatttgctttcggtgtccatccacacgatgtagctgtagcgtgtaccatctcgggcaaccacgcgaatgacttcgcaaagacgatcagcaatacgcgtgcgcccgacggagataaagtcgtagtaaggagaaaggcgtttgaaatcggtatagataaggcttggcagagaatcaacaatgtaatcgccattaagcgtgaacggttcaagtcccggttcaaaatagctgatttcattgccgcgctgtaccacttcccggcgcgggccatccatttgcaacaattgtgcaagaggacggttatcgaggcgtgcatgtcgataacgcagagactcaacaccctgtttattgatgctgatgaaactcagctcgtaattcagactctgactggccaggttcatctgctgtaataacgccccggacgcgggagtggcgctggcgttagcagagaataacaggctacctgtcactaaactcatggcaaaccaaagttgcttcattactggctttgcgttcctaaagtttgaattcctggcacctgtacagcggcttgctgggtttgcgcctgctcaaactgaagctgttcagagtggagtcggcgttgcagttcgtaatcctgcaacattgcattaatgcgacgacgctgctcctgtacctgctgctgttgaccattgtttgcggtcgcttcagaaggtactcccaggcttaccgggctggctttacccatcatcggcagtgtattaaataccggcgtttcgggctgctgggacgtttcagattgtccattatagtgctggacgccaacgataactgcaaggcttacgcatgcggctacgcccatttgggtaagctgtgccgcccacggacgtactttctgccagaatggcattttctgccattgatgcggcgcaggctgggcttccgggatcaatgtcgccggttgacgtactggctcttcttcaatggcggccatcacgcgactagagatatcgaaatggagcacctcgggagtatcaccccgcatactgtcacggattaagtgatagctttcccaggttttctgcatttctgggttatgagccagttcgttaagcagctcactatccagcgtttcgccatccattaaagcggaaagttgttctttctgcatgcctaatacccttatccagtatcccgctatcgtcaacgcctgataagcggttgaactttgttatcaatagcttccctcgctcggaagatacgactacgcaccgtacctaccggacaatccatgatagcggctatctcttcatagctcaggccatccagctcccgcaaggttattgccatgcgtaaatcttccgggagggactcaatagttcggaaaactatctgtctcagttcttcactcaacattaagttctcagggttgctaatttctttcaacgcgccgccactttcgaagttttcagcttcaatggcatccacatcactggaaggtggacgacgcccctgagcaaccaggtaatttttcgctgtatttacagcaatccgatacagccatgtataaaaagcgctatctccccggaagctatccagcgcacgataggctttaataaaagcttcttgtaccacatcgggaacatcaccgctcggcacatagcgggaaaccagactcgccactttatgctgatagcgcactaccagtaagttaaaggctttctgatctcccttctggacccgttcaaccaggacctggtccgttaactgctcgctcatccgaggtaaagtctccccaaaccaaatttccacgcgctatcgaaacgccactccattagctgcaatttgagcaagcaaagggttagagtgtctcgtttttgtaaagttccgtaacgcatctgtttttgtttgtcatgctgtagacggatcattatctatcattataagtctacagaatctgaacatcgcattatctgtgtagaaatgcccatttaactgcctgaagagtaacccaacggcctttttatttcaccacctaatcctccaccagccagtaacttctctttttctcgccgccctgcgtcagcgtgtttagcaactgtaacaaatattaaaatagcaggtgtttatccgcacaacatgatgctatgctgaccaaaccatgtttagtaaattaaacaaagaaaatgaatactctccctgaacatagttgtgacgtgttgattatcggtagcggcgcagccggacttagtctggcgctacgcctggctgaccagcatcaggtcatcgttctaagtaaaggcccggtaacggaaggtagtacattttatgcccagggcggtattgccgccgtgtttgatgaaactgacagcattgacagccatgtggaagacacattgattgccggggctggtatttgcgatcgccatgcagttgaatttgtcgccagcaatgcacgatcctgtgtgcaatggctaatcgaccagggggtgttgtttgatacccacattcaaccgaatggcgaagaaagttaccatctgacccgtgaaggtggacatagtcaccgtcgtattcttcatgccgccgacgccaccggtagagaagtagaaaccacgctggtgagcaaggcgctgaaccatccgaatattcgcgtgctggagcgcagcaacgcggttgatctgattgtttctgacaaaattggcctgccgggcacgcgacgggttgttggcgcgtgggtatggaaccgtaataaagaaacggtggaaacctgccacgcaaaagcggtggtgctggcaaccggcggtgcgagcaaggtttatcagtacaccaccaatccggatatttcttctggcgatggcattgctatggcgtggcgcgcaggctgccgggttgccaatctcgaatttaatcagttccaccctaccgcgctatatcacccacaggcacgcaatttcctgttaacagaagcactgcgcggcgaaggcgcttatctcaagcgcccggatggtacgcgttttatgcccgattttgatgagcgcggcgaactggccccgcgcgatattgtcgcccgcgccattgaccatgaaatgaaacgcctcggcgcagattgtatgttccttgatatcagccataagcccgccgattttattcgccagcatttcccgatgatttatgaaaagctgctcgggctggggattgatctcacacaagaaccggtaccgattgtgcctgctgcacattatacctgcggtggtgtaatggttgatgatcatgggcgtacggacgtcgagggcttgtatgccattggcgaggtgagttataccggcttacacggcgctaaccgcatggccagcaatagtttgctggagtgtctggtctatggctggagcgcggcggaagatatcaccagacgtatgccttatgcccacgacatcagtacgttaccgccgtgggatgaaagccgcgttgagaaccctgacgaacgggtagtaattcagcataactggcacgagctacgtctgtttatgtgggattacgttggcattgtgcgcacaacgaagcgcctggaacgcgccctgcggcggataaccatgctccaacaagaaatagacgaatattacgcccatttccgcgtcagtaataatttgctggagctgcgtaatctggtacaggttgccgagttgattgttcgctgtgcaatgatgcgtaaagagagtcgggggttgcatttcacgctggattatccggaactgctcacccattccggtccgagcatcctttcccccggcaatcattacataaacagataaaaagcctgggtcagcgccgtatacgcttcggaatagttctggtctggcccacgaatgactaagcgatcgctaaagcattctcccgcctgcggggagaatgccagcagcacccgatgcggcagtcgcgcttcgttttccgccacatccgtccgcaaacgtaaatgccagcccatgcttaatgccagctccgtaaaaccattaccaatctgctctggcagcactacgcagaaaaatccctcttcggtaatgcactccgccgcacaggtcagcaagcttgggtgatcaagcgtagtggtatagcgagcctgttcccgttgaggtgtgctgcactctactccctgctgatagtaaggtgggttactgatgattaaatcgaagcgtactgtctgctgtgtaatccactgctgaatatccgccgtatggacgttaatccgctctgcccacggggactggttgatattttcctgcgcctgcgcggcagcttcactttccagttcaactgcatcaatcatcacgctgtcatcggttcgctgcgccagcattaatgccagcaacccgctacccgcgccgatatcaaggcaacgttttaccccagccaccggtgcccatgcgcccaataaaataccatccgttcccactttcatcgcacagcgatcgtgagcaacaaaaaactgtttaaaagtaaatccattacgacgaagcacggatgtagactgactcatgaaaataaaaccttgcaggaaaaacggcgatagcaccgggtgagaacaatacccgagaagcgatatccatacaaacagatgaagattgcagccgtaacgtctataatcagcgccccacacagaggtagaacatgactgtaacgactttttccgaacttgaactcgacgaaagcctgctggaagccctccaggataaaggtttcactcgcccgaccgccattcaggctgccgccattccgcctgcgctcgatggccgtgatgtactcggttctgcgccgacaggcaccggtaaaacggcggcgtatctgctgccagcgttgcagcacctgctcgatttcccgcgtaagaaatccggtccgccgcgtattttgatcctcaccccaactcgcgagctggcgatgcaggtgtccgatcatgcccgcgaactggcgaaacatacgcatctggatatcgccaccatcaccggcggcgtagcctatatgaaccacgcggaagtgttcagcgaaaatcaggacatcgtggtcgccacgaccggacgtctgctgcaatacataaaagaagagaacttcgattgccgcgcggttgaaacgctgatcctcgacgaagcagaccgtatgctggatatgggcttcgctcaggatatcgaacatattgctggcgaaacgcgctggcgtaaacagaccctgctctttagcgcaacgctggaaggcgatgcgattcaggactttgccgagcgtctgctggaagatccggtggaagtttctgccaatccctccacccgtgagcgcaaaaaaattcatcagtggtattaccgcgccgatgatcttgagcataaaaccgcgttgctggtgcatctgttaaaacagccggaagcgacccgcagtattgtgtttgtgcgtaagcgtgagcgtgtgcatgagctggcaaactggctgcgcgaagcgggcatcaacaactgctatctcgaaggtgagatggtacagggcaagcgtaacgaagcgatcaagcgtttgaccgaaggtcgcgtaaacgtactggtcgcaaccgatgttgccgcgcgcggtatcgacattcctgacgtcagccacgtctttaacttcgatatgccgcgcagtggcgatacttatttgcaccgtatcggacgtaccgcgcgcgccggtcgtaaaggcaccgcaattagcctggtggaagcccatgaccatctgctgctgggtaaagtaggccgctatattgaagagccaattaaagctcgcgttattgatgagttacgcccgaaaacgcgtgcgccaagcgaaaagcagaccggcaagccaagcaagaaagtactggctaaacgtgctgagaagaaaaaagctaaagagaaagagaagccgcgggtgaaaaaacgccatcgcgacaccaaaaatattggtaagcgccgtaaaccaagcggaacgggcgtgccaccgcaaacgacagaagagtaatctcaatgccaggtttaagcctggtattaaaagtgctggcaaacgcaaaactgcctgatgcgctacgcttatcaggcctacgtggctcatgcaatatattgaatttgcacgatcttgtaggccggataaggcgttcacgccgcatccggcatgaataaagcgcactttgtcgacaagttaaatgccgggtttaatcccgacattatttttatccagccacaaaactctcttcaacacactgaataaaagtgtgcatcgccgggctaaccgcttttccagcatgatgtgcgcacatggccgtaatggtctggctctgttcgccaaaaggcaattcaattaattctccgcactccaactcttttgccaccgcaaagcgcggtaggtagctgaccccgatattcgccgcgacacaacgcttgatgctttcgatacttataagctcaatggtgttttccaccgtgatccgccgctgacgcagcgtgctctcaaatatctgccggaagacacattgcggttcgttgataataaagctacaggcgttatgtcttcccggctcagtaaaatcgacatctgcaatttgcggactagccaccagcaccagactttgttcacccaactctcgtcgattcagagcatcatcattccctacacgataaaagacgccaacatcggcctcatcattcagtagcgcatcacggatcacgtaacagttcaggctctgcaagcttaaacgcacttttggggcgcgttgccgaaaacgctgcaacacctgcggcattcggtaagagagcaacgtttcgccgctaacaacgcgtagttccccgtccggatcactctcctttttggcagcctcacgaagcgtatccatcactcgggtaagttcataaatgtgcggcagcaacttttttccttcgcgggtaaggcacatccgtcggccaattttctcaaataactggacactaaactcctgctcaagctgctgaatatgaaaagtcaccgtgctttgtgtacagcacaatttttggctagctcgcaaaaaggaaccctcttccaccacggttttaagcgtaataaaacggcgcagatccataaccccaaacctatcgaaaatatcgaatctagaatataaaaacattcatttttttaaatgttccgtgtcgggtactgtctaccaaaacagaggagataacaagtgacaccgacccttttaagtgctttttggacttacaccctgattaccgctatgacgccaggaccgaacaatattctcgcccttagctctgctacgagccatggatttcgtcaaagtacccgcgtgctggcagggatgagtctgggatttttgattgtgatgttactgtgtgcgggcattagttttagtctggcagtgattgacccggcagcggtacaccttttgagttgggcgggggcggcatatattgtctggctggcgtggaaaatcgccaccagcccaacaaaggaagacggacttcaggcaaaaccaatcagcttttgggccagctttgctttgcagtttgtgaacgtcaaaatcattttgtacggtgttacggcactgagcacgtttgttctgccgcaaacacaggcgttaagctgggtagttggcgtcagcgttttgctggcgatgattgggacgtttggcaatgtgtgctgggcgctggcggggcatctgtttcagcgattgtttcgccagtatggtcgccagttaaatatcgtgcttgccctgttgctggtctattgcgcggtacgcattttctattaacgaaaaaaagcggaagaggtcgccctcttccgcttagtaacttgctacttaagccttacaggctttcagtaaaggtacgagcgataacgtcgcgctgctgttccggagtcagagagttaaagcgaactgcataaccggatacacggatggtcagctgcggatatttttccggatgcttaactgcatcttccagagtttcgcgacgcagaacgttaacgttcaggtgttgaccaccttcaacgcgaacttctggtttcacttctactggaacttcacggtattcaatgtcacccagtttgcttactgcaaccacttcatcttctgcataacctgcttttgcaacgatgcaacgcgcttcgcctttttcgctgtccagcagccagaaagagttcagcagatcgtcgttagcggctttagtaatctggatacctgtaatcatgtgatgcctccccggcaaaattatttgatttgttcagcctgtcgcggccaattggtaaaaccattgttgcttgagtgtatatatactcctcaaacacccttgaatctttgatttaaatcaataaaaaccacacatcaagtatggtcgcaaatggattttattgttttacatcaacttatgcgggtgtgaaattttaccaatttacatttttttgcactcgtttaagtctaaaaaatgagcatgattttgttctgtagaaagaagcagttaagctaggcggattgaagattcgcaggagagcgagatggctaacgaattaacctggcatgacgtgctggctgaagagaagcagcaaccctattttcttaatacccttcagaccgtcgccagcgagcggcagtccggcgtcactatctacccaccacaaaaagatgtctttaacgcgttccgctttacagagttgggtgacgttaaagtggtgattctcggccaggatccttatcacggaccgggacaggcgcatggtctggcattttccgttcgtcccggcattgccattcctccgagtttattgaatatgtataaagagctggaaaatactattccgggcttcacccgccctaatcatggttatcttgaaagctgggcgcgtcagggcgttctgctactcaatactgtgttgacggtacgcgcaggtcaggcgcattcccacgccagcctcggctgggaaaccttcaccgataaagtgatcagcctgattaaccagcatcgcgaaggcgtggtgtttttgttgtggggaagccatgcgcaaaagaaaggggcgattatagataagcaacgccatcatgtactgaaagcaccgcatccgagcccgcttagcgcgcatcgtggattctttggctgcaaccattttgtgctggcaaatcagtggctggaacaacgtggcgagacgccgattgactggatgccagtattaccggcagagagtgagtaaatttgcggggaaatgccggatggcagagttgccacccggctgatttatcaggctttattctgacgccaccattcaccaagcaaaacgccggttgcgacagagatattcagcccggcaacgttgcccgtaccgtcaatcttcacgcgcagatcgttcggatcgcgtgcggcatccggtaacccttcatattcctgacccagcaccagtaccattttcgctggcagactagttttgaacagcggtttaccctgctcgctggaagtggtcactacggtgtaacctgcctgacggaaatcatccagcacgttaacaatgttgtcgccagtaatcggctgaacgtgctctgcgccgccttctgcggtacggatagccgccccgctctccagcagtgccgcatcctgcaccacgacacctttcacgccgaagtgcgcgcagctgcgcatcatgccacccaggttatgcgggttagattcgttttccagtgccagaacgcaatcctgcgcgcctgcctggcttacccactgctgcacggttgtaccgttacgctttttgatcaagaagcaaacgccgccgtgatgttccgtgccactcgcttttgtcaattccgcttcatccaccacatggtacgctttgcggtttgctgccatccagcgcaaagcttctttaaaacgcggcgttacactctggataaaccaggcgcgaacaatcgcttccggacggctctggaaaagtgcctgacatgcattttcgccgtagacgcgggtttcttccgcacgctgacgacgcaacacttccggatcaataaaacttttaccactgatgccaccgtgatcggccttttccggcgtctcatcacccggcgcgcgggaaaccgtgcgccacgggctatcttcccacttgcggtcacggggctgactctgtttgtcatcgcgggcggggcgacggccaccgtcagcacgagattttcctggacgcccgccccctttcccggtacgcgggttgtgggtacgtttatcagaatcatcatcactgcggacatacatcactttgaccttgccgcttttacctttcatttcatcgttcatgcttttctccaccagcgctgcgcgaagcgcgcagattacccgaagtccgcgcggttcgccatgatttcgtaccaaagcctgcgactatcatacctattgaataaaacagattgttgtctggaacaatgtccccgataatatgtaacatattagaaacataccggcgtcgttgccgataagtctccttactcatcccgaggttagttatgaataccgtttgtacccattgtcaggccatcaatcgcattcccgacgatcggatcgaagatgcggcaaaatgcggacgctgcggtcacgacttgtttgacggagaggtgattaatgcgaccggtgaaacactcgacaaattgctgaaggatgatctacctgtggtgatcgacttctgggcaccgtggtgcggcccctgccgtaatttcgcaccaatttttgaagatgtcgcgcaagagcgtagcggtaaagtgcgctttgtgaaagtgaataccgaagctgaacgtgaattgagcagtcgctttggaattcgtagtataccgacgatcatgattttcaaaaacggtcaggttgtcgacatgcttaatggcgcagtaccgaaagcgccgttcgatagctggctgaacgaatctctttaatcttaccggggcgcatcttgtgccccgttttctcctctgcgacaatggcgttttttcgacgctctcttatgaccgaaaacgctgttctccagttacgcgccgagcgtattgcgcgcgcaacacgtccttttcttgcccgcggtaatcgcgttcgtcgctgccaacgctgtcttttgccagagaaattatgtctctgtagcacaattaccccagcacaagcaaaaagtcgcttctgtttgctgatgttcgacaccgagccaatgaagcccagtaataccgggcgtctcattgctgatattttgcctgataccgttgcgtttcaatggagccgtaccgaacccagccaggatttgctggagttggtgcaaaacccggactatcagccaatggtggtctttcccgctagctatgctgatgagcaacgggaagtgatcttcacaccacctgccggtaagccaccgctgtttatcatgctcgatggtacctggccggaagctcgcaagatgtttcgtaaaagtccgtatctggataatcttcccgtcatttccgtcgatctttcccggctttctgcctatcgcctgcgtgaagcccaggctgaaggccaatattgtactgccgaggtagccatcgcactgttagatatggccggcgataccggggcggcggcagggttaggcgagcattttacccgctttaaaacacgctatctggcaggaaaaacgcaacatctgggtagcatcacagcagaacagttagaaagcgtttaaaatcattcggtcacttctgcgggagaccggtatgagtcagcgaggactggaagcactactgcgaccaaaaagcatagcggtaattggcgcgagcatgaaacccaatcgcgcaggttacctgatgatgcgtaacctgctggcgggaggctttaacggaccggtactcccggtgacgccagcctggaaagcggtgttgggtgtgttggcctggccggatattgccagcttgccctttacacccgaccttgcggttttatgtaccaatgccagccgtaatcttgctcttctggaagagctcggcgagaaaggctgtaaaacctgcattattctttccgccccggcaagccaacacgaagatctccgcgcctgcgccctgcgccataacatgcgcctgcttggaccaaacagtctgggtttactggctccctggcaaggtctgaatgccagctttagccctgtgccgattaaacgcggcaagctggcgtttattagccaaagcgctgccgtctccaacaccatcctcgactgggcgcaacagcgtaagatgggcttttcctactttattgcgctcggcgacagcctggatatcgacgttgatgaattgcttgactatctggcacgcgacagtaaaaccagcgccatcctgctctatctcgaacagttaagcgacgcgcgacgctttgttagcgcggcccgtagtgccagccgtaataaaccgattctggtgattaaaagcggacgtagcccggcggcacagcgactgctcaacacgacggcaggaatggacccggcatgggatgcggctattcagcgtgccggtttgttgcgggtacaggacacccacgagctgtttagcgcggtggaaacccttagccatatgcgcccgctacgtggcgaccggctgatgattatcagcaacggtgctgcgcctgccgcgctggcgctggatgccttatggagtcgcaatggcaagctggcaacgctaagcgaagaaacctgccagaaactgcgcgatgcactgccagaacatgtggcaatatctaacccgctcgatctacgcgatgacgccagcagtgagcactatattaaaacgctggatattctgctccacagccaggattttgacgcgctgatggttattcatagccccagcgccgctgctcccgcaacagaaagcgcgcaagtattaattgaagcggtaaagcatcatccccgcagcaaatatgtctctttgctgacgaactggtgcggcgagcactccagccaagaggcacgacgtttattcagcgaagccgggctgccgacctaccgtaccccggaaggaaccatcactgcttttatgcatatggtggagtaccggcgtaatcagaagcaactacgcgaaacgccggcgttgcccagcaatctgacttccaataccgcagaagcgcatcttctgttgcaacaggcgattgccgaaggggctacgagcctcgatacccatgaagttcagcccatcctgcaagcgtatggcatgaacacgctccctacctggattgccagcgatagcaccgaagcggtgcatattgccgaacagattggttatccggtggcgctgaaattgcgtagcccggatattccacataaaagcgaagttcagggcgtcatgctttacctgcgtacagccaatgaagtccagcaagcggcgaacgctattttcgatcgcgtaaaaatggcctggccacaggcgcgggtccacggcctgttggtgcaaagtatggctaaccgtgctggcgctcaggagttgcgggttgtggttgagcacgatccggttttcgggccgttgatcatgctgggtgaaggcggtgtggagtggcgtcctgaagatcaagccgtcgtcgcactgccgccgctgaacatgaacctggcccgctatctggttattcaggggatcaaaagtaaaaagattcgtgcgcgcagtgcgctacgcccattggatgttgcaggcttgagccagcttctggtgcaggtttccaacttgattgtcgattgcccggaaattcagcgtctggatattcatcctttgctggcttctggcagtgaatttaccgcgctggatgtcacgctggatatcagcccgtttgaaggcgataacgagagtcggctggcagtgcgcccttatccgcatcagctggaagaatgggtagaattgaaaaacggtgaacgctgcttgttccgcccgattttgccagaagatgagccacaacttcagcaattcattagccgagtcaccaaagaagatctttattaccgctactttagcgagatcaacgaatttacccatgaagatttagccaacatgacacagatcgactacgatcgggaaatggcgtttgtagcggtacgacgtattgatcaaacggaagagatcctcggcgtcacgcgtgcgatttccgatcctgataacatcgatgccgaatttgctgtactggttcgcagcgatctcaaagggttaggcttaggtcgacgcttaatggaaaagttgattacctatacgcgagatcacggactacaacgtctgaatggtattacgatgccaaacaatcgtggcatggtggcgctagcccgcaagctcgggtttaacgttgatatccagctcgaagaggggatcgttgggcttacgctaaatcttgcccagcgcgaggaaagttgagtaaggtactggaaatgttgaccacttaatcgggactggtgttattattgcccgcttatgtcgtctgcattgcacagaggacccttcaatgaacagagaagaaatgcactgtgatgttgagtaaatttaagcgtaataaacatcaacaacaccttgcccaactacccaagatttctcaaagtgttgatgatgtcgatttcttttacgctcccgccgacttccgggagacgctgctggaaaaaatagccagcgcgaagcagcgcatttgcattgtcgccctgtatctcgaacaggatgacggtggcaaaggcattctgaacgcgttgtatgaggctaaaaggcagcgtccggaactggatgtgcgggtgctggtcgactggcatcgtgcacaacgtggacgcattggcgctgcggcatctaacactaacgctgactggtactgccgcatggcgcaggaaaatccgggcgtagatgttccggtttatggcgttccaatcaatactcgtgaagcccttggtgttctgcactttaaaggctttatcatcgacgatagcgtactttatagcggtgccagcctgaacgatgtttacctgcatcagcacgataaatatcgctacgaccgttatcatctgatccgtaaccgtaagatgagtgacattatgtttgaatgggttacacagaatattatgaatggccgcggcgttaatcgtctggatgatgttaatcggccaaaaagcccggaaatcaagaacgatattcgtctgttccgccaggagctgcgtgatgccgcttatcatttccagggcgatgccgacaacgatcagctttctgtaacgccgctagtggggctggggaaaagcagtctgttgaacaagaccattttccatcttatgccttgtgccgagcagaaactaaccatctgtacgccatacttcaacctgccagcaatccttgtgcgcaatattatccagttgctgcgcgaagggaaaaaggtcgaaattattgttggtgataaaaccgcgaatgacttctacattccggaagatgaacctttcaagataattggcgcattgccttatctctatgagatcaatctgcgtcgtttcctgagccgtttgcagtattacgtcaatactgaccagctagtggttcggttatggaaagatgacgacaacacctatcacctgaaagggatgtgggttgatgataagtggatgttgatcaccggtaataacctgaacccgcgcgcctggcgtctggatctggaaaacgccattttgatccacgatccgcaacttgagctggcgccacagcgagagaaagaactggagctgatccgcgagcataccaccatcgttaagcactatcgcgatctgcaaagtattgccgattatccggtgaaggttcgtaaactcatccgccgtttgcgccgtatccgcatcgaccgattaattagccgcatcctgtaatcacaaccccgtcctgtacggggtttgttttttggaggccacgttttgcgtattctttttgtctgttcgctattgttactttctggatgcagccatatggctaacgatagctggagcgggcaggataaagctcaacactttatcgccagcgcgatgctttccgccgccggaaatgaatatagtcagcatcaggggatgagccgggatcgcagtgccatgtttggattgatgttctctgtcagtttgggggcgagtaaagagctttgggatagccgccccgaagggagcggctggagctggaaggatttggcctgggatgtcgccggtgcaagcaccggctataccgtctggcaactgacccgtcattaaagacgcatccccttccctttgcgatgtagcatcaaagaaaccagaaacgccaccacggccatcaaggtcacataccagaagaaggctgtttccattcctatacttttcaggctcaacgctacgtactccgcgctaccaccaaatatagcattagcgaccgcataactcagaccaacgcctaatgcgcgaacctgtgccgggaacatctcagccttcagtattccactgatacttgtataaaaactcactatcagcagggcacacatcaccagaccaaaagcggcataagggctggaaacgttttgcaatgcactgagaataggaacggtaaaaatggctgccaggctaccgaaacataacatactggtacggcgaccaatcttatcgctcagcgcgccaatgagtggttgaataagcatgaatacaaacaatgcggcagtcataatgccactcgccacgttggcatgcattcccgcagtatttaccagatacttctgcatataagtagtgaaggtatagaaacaaagggagcccgcagcggtaaaaccgagaaccatgatgaatgcacggcgattgcgccataatcctttcagagatccagcttcttttaaagcgcgcgtttcttgttggctagtttcatctaactgacgacgtaaccacaacgccacaacagctaacacagctcctaacgcgaaaggaatacgccatccccactctctgagtgcagcgtcttccatggtgtgttgtaaaaccacgacaaccagtagggctagcagttgtccgccgatcaacgtcacatactgaaaacttgcgtaaaaacctttgcgcccttcaacggcaacttcactcatataggtggcgctggtgccatattctccgccaacagataatccctgaaataaacgagcgagaagcaataatgccggagcccacgtacctatagtttcataacctgggaggcaggcgataaccaggcttccgaaacacatcatacacacgcttaacagcatgctttttttgcgaccatgtttatcggctatgcggccaaatagccaaccgcctattgggcgcatcaggaatcccgcagcaaaaacacctgctgtttgtagtagttgagtcgtcgtgttcccggaagggaagaagatgtgggcaaagtagagactacagaagctgtagacatagaaatcgaaccactcgaccagattaccactagaggcccccacaatcgcccaaatgcggcgacgagtatcactacttgtcagtttgctgtctgccgttacagtactttcagccatgccattatgtctcctgccgtaatccgatgcttttgtcggtcgcttttgtttattttttttgtaaaggaaatattatacatttgttgcatatcattatgcaaccttaaccatgaatttagttagcaggaaaatggttattgaggagcttaaggataaatttctggtaaggaggacacgtatggaagtgggcaagttggggaagccgtatccgttgctgaatctggcatatgtgggagtataagacgcgcagcgtcgcatcaggcatttttttctgcgccaatgcaaaaaggccatccgtcaggatggcctttcgcataatttgatgcctggcagttccctactctcgcatggggagaccccacactaccatcggcgctacggcgtttcacttctgagttcggcatggggtcaggtgggaccaccgcgctacggccgccaggcaaattctgttttatcagaccgcttctgcgttctgatttaatctgtatcaggctgaaaatcttctctcatccgccaaaacagcttcggcgttgtaaggttaagcctcacggttcattagtaccggttagctcaacgcatcgctgcgcttacacacccggcctatcaacgtcgtcgtcttcaacgttccttcaggacccttaaagggtcagggagaactcatctcggggcaagtttcgtgcttagatgctttcagcacttatctcttccgcatttagctaccgggcagtgccattggcatgacaacccgaacaccagtgatgcgtccactccggtcctctcgtactaggagcagcccccctcagttctccagcgcccacggcagatagggaccgaactgtctcacgacgttctaaacccagctcgcgtaccactttaaatggcgaacagccatacccttgggacctacttcagccccaggatgtgatgagccgacatcgaggtgccaaacaccgccgtcgatatgaactcttgggcggtatcagcctgttatccccggagtaccttttatccgttgagcgatggcccttccattcagaaccaccggatcactatgacctgctttcgcacctgctcgcgccgtcacgctcgcagtcaagctggcttatgccattgcactaacctcctgatgtccgaccaggattagccaaccttcgtgctcctccgttactctttaggaggagaccgccccagtcaaactacccaccagacactgtccgcaacccggattacgggtcaacgttagaacatcaaacattaaagggtggtatttcaaggtcggctccatgcagactggcgtccacacttcaaagcctcccacctatcctacacatcaaggctcaatgttcagtgtcaagctatagtaaaggttcacggggtctttccgtcttgccgcgggtacactgcatcttcacagcgagttcaatttcactgagtctcgggtggagacagcctggccatcattacgccattcgtgcaggtcggaacttacccgacaaggaatttcgctaccttaggaccgttatagttacggccgccgtttaccggggcttcgatcaagagcttcgcttgcgctaaccccatcaattaaccttccggcaccgggcaggcgtcacaccgtatacgtccactttcgtgtttgcacagtgctgtgtttttaataaacagttgcagccagctggtatcttcgactgatttcagctccatccgcgagggacctcacctacatatcagcgtgccttctcccgaagttacggcaccattttgcctagttccttcacccgagttctctcaagcgccttggtattctctacctgaccacctgtgtcggtttggggtacgatttgatgttacctgatgcttagaggcttttcctggaagcagggcatttgttgcttcagcaccgtagtgcctcgtcatcacgcctcagccttgattttccggatttgcctggaaaaccagcctacacgcttaaaccgggacaaccgtcgcccggccaacatagccttctccgtccccccttcgcagtaacaccaagtacaggaatattaacctgtttcccatcgactacgcctttcggcctcgccttaggggtcgactcaccctgccccgattaacgttggacaggaacccttggtcttccggcgagcgggcttttcacccgctttatcgttacttatgtcagcattcgcacttctgatacctccagcatgcctcacagcacaccttcgcaggcttacagaacgctcccctacccaacaacgcataagcgtcgctgccgcagcttcggtgcatggtttagccccgttacatcttccgcgcaggccgactcgaccagtgagctattacgctttctttaaatgatggctgcttctaagccaacatcctggctgtctgggccttcccacatcgtttcccacttaaccatgactttgggaccttagctggcggtctgggttgtttccctcttcacgacggacgttagcacccgccgtgtgtctcccgtgataacattctccggtattcgcagtttgcatcgggttggtaagtcgggatgacccccttgccgaaacagtgctctacccccggagatgaattcacgaggcgctacctaaatagctttcggggagaaccagctatctcccggtttgattggcctttcacccccagccacaagtcatccgctaatttttcaacattagtcggttcggtcctccagttagtgttacccaaccttcaacctgcccatggctagatcaccgggtttcgggtctataccctgcaacttaacgcccagttaagactcggtttcccttcggctcccctattcggttaaccttgctacagaatataagtcgctgacccattatacaaaaggtacgcagtcacacgcctaagcgtgctcccactgcttgtacgtacacggtttcaggttctttttcactcccctcgccggggttcttttcgcctttccctcacggtactggttcactatcggtcagtcaggagtatttagccttggaggatggtccccccatattcagacaggataccacgtgtcccgccctactcatcgagctcacagcatgtgcatttttgtgtacggggctgtcaccctgtatcgcgcgcctttccagacgcttccactaacacacacactgattcaggctctgggctgctccccgttcgctcgccgctactgggggaatctcggttgatttcttttcctcggggtacttagatgtttcagttcccccggttcgcctcattaacctatggattcagttaatgatagtgtgtcgaaacacactgggtttccccattcggaaatcgccggttataacggttcatatcaccttaccgacgcttatcgcagattagcacgtccttcatcgcctctgactgccagggcatccaccgtgtacgcttagtcgcttaacctcacaacccgaagatgtttcacttcagagttgcgaaaatttgagagactcacgaacaactttcattgttcagtgtttcaattttcagcttgatccagatttttaaagagcaaatatatcaaacaagacttaacagtctgttttgagatattgaggtcggcgactttcactcacaaaccagcaagtggcgtcccctaggggattcgaacccctgttaccgccgtgaaagggcggtgtcctgggcctctagacgaaggggacacgaaaattgcttatcacgcgttgcgtgatattttcgtgtagggtgagctttcattaatagaaagcgaacggccttattctcttcagcctcactcccaacgcgtaaacgccttgctattcacttttcatcagacaatctgtgtgagcactgcaaagtacgcttctttaaggtaaggaggtgatccaaccgcaggttcccctacggttaccttgttacgacttcaccccagtcatgaatcacaaagtggtaagcgccctcccgaaggttaagctacctacttcttttgcaacccactcccatggtgtgacgggcggtgtgtacaaggcccgggaacgtattcaccgtggcattctgatccacgattactagcgattccgacttcatggagtcgagttgcagactccaatccggactacgacgcactttatgaggtccgcttgctctcgcgaggtcgcttctctttgtatgcgccattgtagcacgtgtgtagccctggtcgtaagggccatgatgacttgacgtcatccccaccttcctccagtttatcactggcagtctcctttgagttcccggccggaccgctggcaacaaaggataagggttgcgctcgttgcgggacttaacccaacatttcacaacacgagctgacgacagccatgcagcacctgtctcacggttcccgaaggcacattctcatctctgaaaacttccgtggatgtcaagaccaggtaaggttcttcgcgttgcatcgaattaaaccacatgctccaccgcttgtgcgggcccccgtcaattcatttgagttttaaccttgcggccgtactccccaggcggtcgacttaacgcgttagctccggaagccacgcctcaagggcacaacctccaagtcgacatcgtttacggcgtggactaccagggtatctaatcctgtttgctccccacgctttcgcacctgagcgtcagtcttcgtccagggggccgccttcgccaccggtattcctccagatctctacgcatttcaccgctacacctggaattctacccccctctacgagactcaagcttgccagtatcagatgcagttcccaggttgagcccggggatttcacatctgacttaacaaaccgcctgcgtgcgctttacgcccagtaattccgattaacgcttgcaccctccgtattaccgcggctgctggcacggagttagccggtgcttcttctgcgggtaacgtcaatgagcaaaggtattaactttactcccttcctccccgctgaaagtactttacaacccgaaggccttcttcatacacgcggcatggctgcatcaggcttgcgcccattgtgcaatattccccactgctgcctcccgtaggagtctggaccgtgtctcagttccagtgtggctggtcatcctctcagaccagctagggatcgtcgccttggtgagccgttaccccaccaacaagctaatcccatctgggcacatccgatggcaagaggcccgaaggtccccctctttggtcttgcgacattatgcggtattagctaccgtttccagtagttatccccctccatcaggcagcttcccagacattactcacccgtccgccactcgtcagcgaagcagcaagctgcttcctgttaccgttcgacttgcatgtgttaggcctgccgccagcgttcaatctgagccatgatcaaactcttcaatttaaaagtttgatgctcaaagaattaaacttcgtaatgaattacgtgttcactcttgagacttggtattcatttttcgtcttgcgacgttaagaatccgtatcttcgagtgcccacacagattgtctgataaattgttaaagagcagtgccgcttcgctttttctcagcggcgcggggtgtgcataatacgccttcccgctacagagtcaagcatttctttgcttttctctgttgagattctcaggagaaccccgccgacccggcggcgtgtttgccgttgttccgtgtcagtggtggcgcattatagggagttattccggcctgacaagcgaaaaatataaaaactttatcgttcgctcacttttcaggcaaaacatcttaaatatagtcttttccgtctaacttatagacaaaaacgagccccgaagggctcgttttatcatttactggacggcgacaatccggtcttcattaacttccaggcgaatcactttacccggaaccaattcaccagacagtatttgctgtgccagcgggttttcgatctgctgctgaattgcacgtttcagaggacgtgcaccatagaccggatcgtaaccgttctcgctcagcagtttcagcgcctcgtcagaaatgtggatttcataaccacgttcttccagacgtttgtacagacgtttcaactgaatctgcgcaatgctggcaatgtgctgttcacccagcggatggaagaccaccacttcatcgatacggttaatgaattccggacggaagttatggcttaccacaccgagcaccagctctttcatgtgcgcataatccagttcaccgaagcgttcctgaatcagatcggaaccgaggttagaggtcataatgacgaccgtattacggaagtcgaccgttctcccttgcccgtcagtcagacgcccatcatccagtacctgcaacagaatgttgaagacatccggatgcgctttttccacttcatccagcaggatgacggaatacggacgacgacgcaccgcttcggtcaggtagccaccttcttcataaccgacatatcccggaggcgcaccaaccaaacgagacacgctgtgtttctccataaactcggacatatcgatacggaccatcgcctcgtcgctatcaaacataaagttcgccagcgccttacaaagctctgttttccccacaccagttgggccgaggaacaggaaactaccaatcgggcgatttggatccgccagccccgcacggctacgacgaatagcgttagataccgcatcaaccgcttcgttctgaccaattacgcgatggtgcagttcttgctccatacgcagcagtttttcgcgctcgctttccatcatgcgagaaaccggaatccccgtccaacgcgccagcacttcagcaatttcggcgtcggtcactttattacgcaacagacgcatagttttgccttcgagctgcgttgcggcttccagttgcttttccagttccgggattttgccgtattgcagttcagacatccgcgccaggtcccccacacggcgagcctgttcaatagcgattttcgcctgttccagttccgctttaatggtctgcgtaccagaaaggcttgccttctctgctttccactcttcttctaactcggagtactgacgttctttgtcgctcagttcttcgttgagcatatccagacgttttttactggcttcatcagactctttcattaacgcctgttgttccagtttgagctggatgatacgacgatcgagtcggtcgagttcttctggtttactgtcaatctgcatacgaatgctggatgctgcttcatcgatcaggtcgatggctttatccggcagctgacggtcagcaatgtagcgatgagacaacgtcgccgctgcaacaattgccgggtcagtaatttgcacatggtggtgcaattcgtaacgttctttcaggccacgcagaatcgcaatggtatcttcaacagaaggctcggcaacaaacactttctggaaacgacgttccagcgcagcatctttttcaatgtactggcgatattcgtcaagcgtcgtggcacctacgcagtgcaattcaccacgcgccagcgccggtttcagcatgtttccggcgtccattgcgccatcggctttacccgcgccgaccatggtatgtaattcgtcgataaataggatgacgttgccttcctgtttggcaagatcgttaagcacgccttttaaacgttcttcaaactcaccgcgatatttcgccccagccaccagcgcgcccatatccagcgccagtacccggcggcctttcaacccttccggcacttcgccgttgataatacgctgcgccagaccttcaacgatggcagttttaccgacgccgggttcaccaatcagtaccgggttatttttagtacgacgttgcagcacctgaatggtacggcgaatttcttcatcacgaccaatcaccggatcgagtttgccctgttcggctcgttcggtaaggtcgatggtatattttttcaaagcctgacgttggtcttcagcaccttgatcgttcacgctttcacctccacgcatttgttcaatcgcttgagtaatgttggcggtggtcgcccctgctgctttcaggatgtcggccagcgtgccgcgagactcaagtgccgccagaacgaacagttcactgctgataaagttatcaccacgtttttgcgccagcttgtcgcaaagattaagaacgcgcaccagatcctgacttggctggacatcaccaccagtaccttcaacctgcggtaaacgatttaatgcctgattgatatctgtgcgcaactggccagcatttatgccagcggatgttaataaaggactaacgctacccccttcctgattcagcagggcgctcattaaatgaagtggttcgataaattggttgtcgtgcccgagtgcaagactttgggcatcggcaagagcaagctggaatttattagtaagacgatccagacgcataactcctcccataacggatcaaagttgctactggagattaaatgaggtcatccctcaattattcaaggttattgaccagattaatgtgaaaagaaaatcacgcgtaccggatcgtcttgattctttaggttatatcagccaaatgaaacttgccatacgaccggtggtcttgtcgcgacgataagagaagaaagtctcattttccgtatatgtacaacggtcgccgccgaaaatttgctcaacacccacgttcgccagacgctgccgggcaagctgataaatatccgccagatacttatcaccatgctgaatgaaagctgcacttgctttagcgtctactgccataaacgcctcgcgaacctccccccccacttcgaacgcgcgtggaccaattgccggccctaaccaggcgagaatattttccggattatcagcaaaacaggaaaccgtctcttccagcacgcctgcgcacagtccacgccagccagcatgagcggcggcgacttccgttcccgctcgattgcaaaacagcacagggaggcagtcggcagtcatcactgcgcaaaccgtgccgggcgtattgctataagaggcatccgcccgtttactggcataaggttcgccagtgagcttaagcacatctttgccgtgtacctgctcaagccagaccggtttagaaggcaaattgcccgcagcaaaaagtcgcttgcgattctcctcaacgtgatccgggttatcgccacaatgggcaccgaggttgagactgtcatacgggggcaagctcacgccgccgatacgagtggagctacaggccgcaacaccttttggctgcggccactgcgggacaatcagcttactcataaccagtccacttcatccttatgttcttcgaaatcggcgcgcatcacctcaatcagctccaccatatcttgtggaataggcgcatgccattccatttcgatgccggagatcgggtgataaagacgcagcatggttgcatgtagcgcctggcggtcaaacttacgcagcgtggagataaatgcttcgctagcaccttttggcggacgcggacggccaccataaaccggatcgcccaccagcggatgagtgatatgggccatatgcacgcggatctggtgcgtacgtccagtttccagacgcaaccgcagacgcgtgtgcacacggaagtgttccatgatgcgatagtgagtcaccgctggtttgcccatcggatgcaccgccatatgggtacgtttggtcgggtggcgactgattggctcgtccaccgtgccacctgcggtcatatgaccaatcgccaccgcttcatactcacgagtaatttcacgccgttgcaaagattcgactaaacgcgtctgagccggaacggtttttgccacaaccatcaggccagtggtgtctttatccagacgatggacgatgcccgcacgcggtacatcggcaatgggtggatagtaatgaagcaacgcattcagtaccgtgccatccgggttacccgcgccaggatgtaccaccaggtcgcgcggtttattaatgataataatgtcttcatcttcatagacgatatccagcgggatatcctgcggttcaaaacgcgcttcttcttcaatctcagcgttgatggcaacctgctcgccacccaatactttttctttcggcttatcacaaactttgccgttaaccagcactcgctggtcgaggatccattcttttattcggctacgactataatccgggaacatttcggccaaagcctgatctaagcgttgaccgagttggttttcggacaccgttgcagtgagctgtactcgttgtgccatatatactgcttcttcgtttatcgttggggttttacggctttgccgtttaatatagtgtgctattgtagctggtcttaaccgggagcaggaacagagaatctcccgtattacattttgaggaaagtcaaaacgtcatgacgcgcatgaaatatctggtggcagccgccacactaagcctgtttttggcgggttgcagcgggagtaaggaagaagtacctgataatccgccaaatgaaatttacgcgactgcacaacaaaagctgcaggacggtaactggagacaggcaataacgcaactggaagcgttagataatcgctatccgtttggtccgtatagccagcaggtgcagctggatctcatctacgcctactataaaaacgccgatttgccgttagcacaggctgccatcgatcgttttattcgccttaacccgacccatccgaatatcgattatgtcatgtacatgcgtggcctgaccaatatggcgctggatgacagtgcgctgcaagggttctttggcgtcgatcgtagcgatcgcgatcctcaacatgcacgagctgcgtttagtgacttttccaaactggtgcgcggctatccgaacagtcagtacaccaccgatgccaccaaacgtctggtattcctgaaagatcgtctggcgaaatatgaatactccgtggccgagtactatacagaacgtggcgcatgggttgccgtcgttaaccgcgtagaaggcatgttgcgcgactacccggatacccaggctacgcgtgatgcgctgccgctgatggaaaatgcataccgtcagatgcagatgaatgcgcaagctgaaaaagtagcgaaaatcatcgccgcaaacagcagcaatacataacagaaacctgaaacacaaaacggcagcccttgagctgccgtttttttattctgtcagttgtgaaactgaagcgatttagtcgctatcgatctcatcaaatatggctcgctttgagatattcctcaagtaaaaaaacatctcttcctgcgatttctcacaaaaaagattcgttgacaaaaagtgacaaaattatgagattttcatcacacattttgacatcaggaacggtatgctgaattcaccaagacgggaagacaagaggtaaaatttatgacaatgaacattaccagcaaacaaatggaaattactccggccatccgccaacatgtcgcagaccgtctcgccaaactggaaaaatggcaaacacatctgattaatccacatatcattctgtccaaagagccacaagggtttgttgctgacgccacaatcaatacacctaacggcgttctggttgccagtggtaaacatgaagatatgtacaccgcaattaacgaattgatcaacaagctggaacggcagctcaataaactgcagcacaaaggcgaagcacgtcgtgccgcaacaagcgtgaaagacgccaacttcgtcgaagaagttgaagaagagtaatcctttatattgagtgtatcgccaacgcgccttcgggcgcgttttttgttgacagcgtgaaaacagtacgggtactgtactaaagtcacttaaggaaacaaacatgaaacacataccgtttttcttcgcattcttttttaccttcccctgaatgggaggcgtttcgtcgtgtgaaacagaatgcgaagacgaacaataaggcctcccaaatcggggggccttttttattgataacaaaaaggcaacactatgacaagcgaaaacccgttactggcgctgcgagagaaaatcagcgcgctggatgaaaaattattagcgttactggcagaacggcgcgaactggccgtcgaggtgggaaaagccaaactgctcagccatcgcccggtacgtgatattgatcgtgaacgcgatttgctggaaagattaattacgctcggtaaagcgcaccatctggacgcccattacattactcgcctgttccagctcatcattgaagattccgtattaactcagcaggctttgctccaacaacatctcaataaaattaatccgcacagtgcacgcatcgcttttctcggccccaaaggttcttattcccatcttgcggcgcgccagtatgctgcccgtcactttgagcaattcattgaaagtggctgcgccaaatttgccgatatttttaatcaggtggaaaccggccaggccgactatgccgtcgtaccgattgaaaataccagctccggtgccataaacgacgtttacgatctgctgcaacataccagcttgagcattgttggcgagatgacgttaactatcgaccattgtttgttggtctccggcactactgatttatccaccatcaatacggtctacagccatccgcagccattccagcaatgcagcaaattccttaatcgttatccgcactggaagattgaatataccgaaagtacgtctgcggcaatggaaaaggttgcacaggcaaaaagtccgcatgttgctgcgttgggaagcgaagctggcggcactttgtacggtttgcaggtactggagcgtattgaagcaaatcagcgacaaaacttcacccgatttgtggtgttggcgcgtaaagccattaacgtgtctgatcaggttccggcgaaaaccacgttgttaatggcgaccgggcaacaagccggtgcgctggttgaagcgttgctggtactgcgcaaccacaatctgattatgacccgtctggaaagtcgcccgattcacggtaatccatgggaagagatgttctatctggatattcaggccaatcttgaaagtgcggaaatgcaaaaagcattgaaagagttaggggaaatcacccgtagtatgaaggtattgggctgttacccaagtgagaacgtagtgcctgttgatccaacctgatgaaaaggtgccggatgatgtgaatcatccggcactggattattactggcgattgtcattcgcctgacgcaataacacgcggctttcactctgaaaacgctgtgcgtaatcgccgaaccagtgctccaccttgcggaaactgtcaataaacgcctgcttatcgccctgctccagcaactcaatcgcctcgccgaaacgcttatagtaacgtttgattaacgccagattacgctcactgctcataatgatgtcggcataaagctgcggatcctgagcaaacagtcgcccgaccatcgccagctcaaggcggtaaatcgggctagagagcgccagaagttgctcaagctgaacattttcttctgccaggtgcagcccgtaagcaaaagtagcaaagtggcgcagtgcctgaataaacgccatattctgatcgtgctcgacggcgctaatacgatgcagccgagcgccccagacctgaatttgctccagaaaccattggtatgcttccggtttacgtccatcacaccagaccacaacttgctttgccaggctaccgctgtccggaccgaacatcgggtgtagccccagcaccggaccatcatgcgccaccagcatggcctgtaatggcccatttttcacacttgccagatcgaccagaatacaatctttcggtaaaggcggtaatttgccaataacttgctcagtaacgtggattggcacactaacaatcaccattccggcatcggcaacaatatcagccgctcgatcccagtcatgttgctccagaatccgcacctgataaccgctgagggtcagcatcttctcgaacaggcgtcccatctgaccgccaccgccgacgataaccaccggacgcagactcggacaaagtgttttaaatcctttgtcgttttcactggagtaagattcacgcatcacccgacgcaaaacatcctcaatcagatctggcggtacacccagagcttccgcctctgcacgacggctggccaacatagatgcctcgcgctccggaacataaataggcagtccaaagcggcttttcacctcgcccacttcagcaaccagttccagacgcttcgctaataaattcagcagcgctttatcgacttcatcaatttgatcgcgtaatgcggtcaattcagcaaccataataaacctcttaagccacgcgagccgtcagctgcccgttcagatcctgatgaatttcacgcagcaaggcatcggtcatttcccagctaatgcaggcatcggttacggatacaccgtatttcatttcactgcgcggttgctcggaagactgattgccctcgtggatattactttcgatcatcagaccaataatactgcgattgccatctttgatttgagcaaccacggattctgccaccgcaggctgacggcgataatctttattggaattaccgtggctgcaatctaccatcagagacgggcgcagtcccgcctgttccatctctttttcacattgcgcaacatccgcagggctatagttcggcgctttaccaccgcgcaggatcacatggccgtccggattcccctgagtttgtagcaacgcaacctgccctgcctggttaatgccaacaaaacggtgcggctgggcggcggcgcgcatagcgttaattgctgttgccagactgccgtcggtgccgtttttaaaaccaaccggcatggaaagcccggaggccatttcacggtgagtttggctttccgttgtacgagcaccaattgcactccagctaaacagatcgcccaggtattgcgggctattcggatctaacgcttccgtcgccagtggcagtcccatattcaccagctcaagcagcaatttacgcgcgatctgcagcccggcttctacatcaaaagagccatccatatggggatcgttaattaaccctttccagccgacagtggtacggggtttttcaaaatagacgcgcattaccagatagaggctatcgctgacctctgcggcaagggctttaaatcgacgagcatattccagagcagtttccggatcatgaatggaacaaggaccacatactaccagcagacgaggatcgcgcccggcgataatatcactaatgcttttacggctgtcagcaatctgggcttcttgttgcaggctcaatggaaaagcggccttcagttgttccggagtcattaaaacctgttcgtcggtaatatgtacgttattcagcgcgtctttttgcatgatggcgatcctgtttatgctcgtttgcgatagttgatcctcagcgaggatgacgtaacgataacacataaagtaaagttttcaatccatatttcgtacatttttatttacacaggcaatttagtcgcgctttcaacccttacctctgtatagataaatttacactccctttgaaaacaatccgctatgctttgaaaaaggagaaagaaatgatgaaaaagtttatcgcccccttgttggctttactggttagcggatgtcagattgatccttatactcacgcgccaaccttgaccagcaccgactggtatgatgtcggtatggaagatgcgataagcggcagcgccataaaagatgacgatgcatttagcgatagtcaggcggatcgcggtctataccttaaaggatatgccgaaggacaaaagaaaacttgccagaccgattttacttatgcccgaggactttccggtaaaagctttcctgccagctgcaacaatgttgaaaatgccagccaactgcatgaagtaggcaaaaaggggctgatgaaaatgccagcacaatacgattaaattaattaaaaccccacaaataaattaaacataagattttactcattgtgttttatttctcacattgatgacggtcgcatgaaaaaatgatattttaatgagcattctgaaaaaatatcgatgcatttcgagcgaagatggtggggatccctgaatgcgtttttctcaccgactgttcttacttctgattctcctgctgacgggagcaccaatactcgctcaggagccttctgacgttgcgaaaaacgtgcgtatgatggtttccggtattgtcagttacacccgctggcctgcgctaagtgggccaccaaagttatgtatctttagttctagtcgttttagtaccgccctacaagagaatgccgcgacatctttgccttatctgcctgtcatcattcacactcaacaagaggcgatgattagtggctgcaatggtttttattttggcaacgagagtccgacattccagatggaattaaccgaacaatatccgagtaaggcgttattattaattgccgaacaaaataccgagtgcattattggtagcgccttttgtctgatcatccacaataatgacgtcagatttgccgtaaacctggatgccttaagccgtagcggtgtaaaggtcaacccggatgtcttaatgctcgcacggaagaaaaatgatggataacgataattctcttaataagcgccccacgtttaaaagagcattacgcaacatcagtatgaccagcatatttatcactatgatgctgatctggttgctgctttccgtgaccagcgtgctgaccctgaaacagtacgcgcaaaaaaacctggcactgacagcagcaacaatgacttacagtctggaagcagctgtcgtttttgccgatggccctgcagcaactgaaacactggcagcgctgggccagcaagggcaatttagtactgcagaagtacgtgataagcagcaaaatattctggcatcctggcattacacccgtaaggatccaggcgatactttcagtaatttcataagccactggctcttccctgcccccatcattcagccgattcgtcacaatggtgaaaccattggcgaagtacgcttaaccgctcgcgacagtagtatcagccattttatctggtttagcctcgccgtactgaccggttgtattctgctggcaagtggcatcgcaattaccctcacccgccatttgcacaatggcctggtagaagcgctgaaaaatatcaccgatgtcgtacatgatgtgcgttccaaccgcaatttttcccgacgagttagcgaagaacgtatcgctgagtttcaccgcttcgctctcgacttcaacagtctgctggatgaaatggaagagtggcagcttcgtttacaggctaaaaatgcgcagcttctacgtaccgcgctacatgacccattaaccgggctggctaaccgcgcagcgtttcgtagcggcatcaacacgttgatgaacaattccgatgcccgaaaaacgagcgcgttactatttcttgatggcgataatttcaaatacatcaatgatacctggggtcatgcgacgggcgatagagtcttgattgaaatcgcaaaacggttagctgaatttggcgggctgcgacataaagcataccgcctgggcggcgatgaattcgctatggtgctctatgatgtacagagcgaatctgaagtgcagcagatatgtagtgcactgacacaaatctttaatctcccgtttgatcttcataatggccatcagaccaccatgacattaagcattggttacgcgatgaccattgagcacgcctctgcggaaaaattacaagagcttgccgatcacaatatgtatcaggccaaacaccagcgtgccgaaaagctggtgagataacaaggatatatcgatatgataaagcacctggtagcacccctggttttcaccagtctaatactgactggctgccagtcccctcagggaaagtttactcctgagcaagtcgccgctatgcaatcttatggatttactgaatccgccggcgactggagcctgggcttaagtgatgccattctgttcgcaaaaaatgactacaaattgctcccggaaagccagcaacagatccaaaccatggcagctaaattggccagcacagggctaacacatgcccgtatggatggacacaccgataactatggtgaagacagttacaacgaaggcttaagtttgaaacgggcgaatgtcgtggccgatgcatgggctatgggtggacaaattccacgcagcaatctcaccacacagggtttaggaaaaaaatatcccatagccagtaacaagaccgcccagggccgcgccgagaaccgccgcgtcgcagtggtgattactaccccttaaaacaccagcaaacagataaaaaagggccagccaattggccagcccttcttaacaggatgtcgcttaagcgaaatcttagttaagacgctctttgatacgagcagccttaccagtacgctcacgcaggtagtacagtttagctttacgaacagcaccacgacgtttgacagaaatgctgtcaactaccggagagtgagtctggaagacacgctcaacgccttcgccgttggaaattttacgaacagtgaatgcagagtgcagaccgcggttacgaatagcgataaccacgccctcgaatgcctgcagacgttttttggaaccttcaacaacccatactttcacttccacggtatcacccggacggaaggaaggtacgtcctgcttcatctgctcttgttcaagttgcttaataatgttgctcataatttaatctcttatcctgggtaaactgatatctcgggggcttacgccatcccatcatgtttatgttgctgttgtgcgtgttccgttttgaactccgccagcaaccttgcttgctcttcagtcagagccaggttttccagaagttcaggtcttctaagccaggtacggcccaggctctgtttcaaacgccagcgacgtatctcggcatggttgccgctcagtaacactggcggaacttccatcccttctaacacctcaggccgcgtatagtgcgggcaatccagcaatccttcagcaaaggaatcttccgttgcgctggcttcatgtcccagtactcccggaataaaccgggaaacggagtcaatcagcgtcattgctggtaactcaccaccactgagaacgtaatcgccgatactccattcttcgtcaatttcggtttggatcacgcgctcatctataccttcgtagcgaccgcacaccagaatcaatttttgattcgttgccagttcgctgacgcccgcttgatcaagcttgcgtccctgtggactcagataaatcacctttgcgccttcacccgccgcggcttttgctgcatgaatggcgtcccgcaagggttgcaccatcattaacatccccggtccgccgccgtaaggacgatcgtccacggtacggtgccggtcatgcgtgaagtcgcgaggactccagctctggatgctcagcaggccatttttaactgcccggccagttaccccgtaatcggtaattgcgcggaacatttcaggaaacaggctaattatgccaatccacatagcgccgtcttttaccgtttatccggtggtttaaaaaccaggatcccaatctacttcgatactacgagtagtgagatcgactttcttgataacctgcccatcgaggaacggtacgagacgttccttgataccaaacgcatctttcaggtttgccttaatgacgagaacgtcattagatccggtttccatcatatcgacgactttaccgagatcgtagccttcagtggttactacctggcagcccatcaggtctttccagtagtagtccccctcttcaagctgaggcagctggctactatccacgacaatttcacaattcgtcagcaggttcgccgcatcacgatcgtcaacgcctttcagcttgatgatcatgtcctgattgtggtgcttccagctttccagctggacttgctgccactgacccgccttctggataaaccagggctgatagtcaaaaatgctttcggcgtcttcggtggaagaaaacactctgagccacccacgaataccgtaagagctacccatttttcccaaaacgatgggatcaacaggtgcttgcgcggtgagttgtttgctcatcatgaccaccgtgacagattaagctgctttgtttacttctttgatcagcgcagcaacgcgatcagaaatagttgcgccctggccaacccagtgagcgatgcgatccagatccaggcgagtgccttcttctttttcgctagcgattgggttgaagaaaccaacgcgctcgatgaagcgaccgttgcgtgcattacggctgtcagcgacaacaacctggtagaacggacgctttttagcgccgtgacgtgctaaacgaatagttaccataacatcctcttgtgtgaataaaacaaccggaccccatcgaggaacggagtccggtgtcatattaaaagcccgaaaattttactcatttttgcgggaattgcaatcaacagttgctaactctgctgtaaaaggccgtcggcggtgcagccagtttggtgccggagtgcgcgcagtcaccggagcgtacacgcagtacgtgaggatgacgagcacatcccggtgccaaaatggcaaacaagccaggccgattagcgaccagggaagcctgggggcatcatacccttcatgcttctcatcatcttcgccattccgcccttcttcattttcttcatcatgcgctgcatgtcgtcgaactgtttcagaagacggttaacgtcctgcacctgcataccgcaaccggcagcaatacggcgtttacggctacctttgatgatttctggcttagcgcgctctttcatcgtcatgctgttgatgatggcttccatacgcaccagcactttatcgtccatctgactcttgacgttatccgggatctgccccatgcccggcagcttgcccatcagactagccatgccgcccatatttttcatctggcgcagctgctcaagaaagtcgttgagatcgaagccgtcaccttttttcagcttgctggctaatttctctgcctgcgcgcggtcaactttgctttcgatatcttcgatcaggctcagtacgtcgcccatgccgagaatacggctcgcgatgcggtccggatggaacggctccagcgcctcagttttctcgccaacaccgaggaacttgatcggtttgccagtgatgtgacgaatagagagcgccgcaccgccgcgggcatcgccgtccactttggtcaacactacgccggtaagcggtaacgcttcattgaatgcttttgccgtattggccgcatcctgaccggtcatggcgtcaaccacaaacagggtttcaaccgggttaatgctcgcatggacttgtttgatctcgtccatcatcgcttcgtcaacgtgcagacgaccagcggtatccaccagcagcacgtcgtagaatttcagtttggcttctttcagcgccgcgttaacgatatctaccggcttctgaccaacatcagaagggaagaaatcaacgcccacctgctctgccagcgtctcaagctgtttgattgccgccgggcgataaacgtcggcagaaaccaccagcactttcttcttgtgcttctcgcgcaggaacttaccgagtttaccaacgctggttgttttaccggcaccttgcaggcccgccatcagtacgaccgcaggcggttgcgcagccaggttcagggtctggttctcttcgcccatcgccgcaaccagttcgttacggactattttgacgaactcctgccccggcgtcaggctcttattaacttcatgaccaaccgctttctcttttacgcgattgataaactcacgcactaccggcagagctacgtccgcctccagcagcgccatgcgcacttcgcgcagcgtatcttttacgttgtcttcagtgaggcgtccacggccactgatattgcgcagcgtgcggctcaaacgatcggttaaattatcaaacattgtctctcgcctggggtggaaacggttggccgcaatcgcgacacatcatcagtattttgccgcagtataacatgaaggcgtctttgttgttatgcaacggttggagcagcgtagtcctgacgctatactgcttctctttcttattgctcaaactgtcgacatcactatgcccgtttttgctctgctcgcgcttgtcgcctactccgtcagtcttgcgctgattgttcccggtctgctgcaaaaaaacggcggctggcggcgcatggctattatttctgcggtcattgcgctggtctgccacgcaatcgctctggaagcccgcatcctgcccgacggtgatagcggacaaaacctcagcctgctgaacgttggtagtttggtcagtttgatgatctgtacggtaatgaccattgtggcttctcgcaatcgtggctggctgctgctacccattgtctatgcctttgcgcttatcaacctggcgctggcaaccttcatgcccaatgaatacatcacccatctggaagctacgcctgggatgctggtgcacattggcttaagcctcttttcctatgccacgctaattatcgccgccctgtacgcgctgcaactggcgtggattgattaccaactgaagaacaagaagctggcgtttaaccaggaaatgccgccattgatgagtatcgagcgtaaaatgttccacatcacgcagattggcgtggtgctgctaacgctcacgctttgcactggcctgttctacatgcacaacttatttagcatggaaaatatcgacaaggctgtgctctctatcgtggcgtggtttgtctatattgtgctgctgtggggacattatcatgaaggatggcgtggacgccgcgtcgtctggtttaacgttgcgggcgcggtaattctgacactggcctacttcggcagccgaattgtccagcagttaatcagctaaacccagaaaaggagtttcccctggaacacatttctactactacgttgatcattattctgatcatcatggtggtcatttcagcctatttttccgggtccgaaaccggaatgatgaccctcaaccgctatcgtctgcgacatatggcgaaacagggtaatcgcagcgccaaacgcgtcgaaaaattgctgcgtaagccagaccgcctgataagcctggtgttaatcggcaataacctggtcaatattcttgcctccgcgctcggcactattgttgggatgcgtttgtacggcgatgcgggcgtggcaattgcgactggtgtgctgacttttgtcgtactggtatttgctgaggtattgccgaaaaccattgccgcgctgtacccggaaaaagtcgcttatccgagtagttttctgctggctccgctgcaaattttgatgatgccgctggtctggttgctgaatgctatcacccgtatgctgatgcgcatgatgggtatcaaaaccgatatcgtggttagcggctctttgagcaaagaagagttgcgcactatcgtgcacgaaagtcgcagtcaaatttcccgtcgcaatcaggatatgctgctgagcgtgctcgatctggaaaaaatgaccgttgatgacatcatggtgccgcgcagtgaaattatcggtattgatatcaacgatgactggaaaagcattctgcgccaactctcccacagtcctcacgggcgcatcgtgctctaccgtgatagcctggacgacgccatcagtatgctgcgagtacgtgaagcctggcggttgatgagcgagaaaaaagagttcaccaaagaaaccatgctgcgcgccgcggacgagatctattttgtgccggaaggtacgccgctcagcacgcagttggtaaagtttcagcgcaacaaaaagaaagtcggcctggtcgtcaacgagtatggagacattcaggggctggtgacggttgaagatattctggaagagattgtcggcgatttcactacgagcatgagcccaacacttgccgaagaggtcacgccgcaaaacgacggtagcgtgattatcgatggcaccgccaacgtgcgggaaatcaacaaagcctttaactggcatctaccggaagatgatgcccgcacggttaatggcgtcattcttgaggcactggaagagatccctgtcgcaggcacccgcgtgcgtattggcgagtacgatatcgatattctcgacgtacaggacaatatgattaagcaggtaaaagtttttcctgtgaaaccgctgcgcgagagtgtggcggagtaacgaaaacggcccggcattcgcatgcagggccgtgaattattacgaaagcagaaattaagcttttgctttcgctacagtaaccatcgccgcacgaatcgtacgaccattcagcgtataacccttctgcataatgcccagtacgttacctggcgcaacgtcatcagattccaccattgcgatggcctgatgcacattcgggtccagtgggacgttagtttcggcgatcacttcaacgccaaacttacgcacaacatccagcatgctcttcagcgtcagctcaatgccttcaaccatcgcagacatatccgggttagctttatcagccacttccagcgcacgatccaggctatcaatcaccggcagcaattcgttgatgaatttctccagcgcgaatttgtgggctttttcaatatccagttcagtacgacgacgcaggttttccatttcggcttttacacgcaaaatgccgtcacgttcacgggtctgggcttcagccagctgagcttcgagattcgcaactttttcatcgcgcggatccacctgctcagcagaagcttctggctcaactgcctcaatctcttcgtgctgatccatgataatttcttccggggcttgcccctcaggcgttttctgttctttactactcatgaatttctccgcgtttttttcgcattcatctcgctaacttcgcttattatggggatcagtttcagggtttcaagggaagcactcacattgtcatcaatcttcgcaacaaggacctcggaaaaatgaataatcatttcaagtgtattggcattgtgggacacccacggcaccccactgcactgacaacacatgaaatgctctaccgctggctgtgcacaaaaggttacgaggtcatcgttgagcaacaaatcgctcacgaactgcaactgaagaatgtgaaaactggcacgctcgcggagattgggcaactagctgatctcgcggtagtcgttggtggcgacggtaatatgctgggcgcggcacgcacactcgcccgttacgatattaaagttattggaatcaaccgtggcaacctgggtttcctgactgaccttgaccccgataacgcccagcaacagttagccgatgtgctggaaggccactacatcagcgagaaacgttttttgctggaagcgcaagtctgtcagcaagattgccagaaacgcatcagcaccgcgataaatgaagtggtgcttcatccaggcaaagtggcgcatatgattgagttcgaagtgtatatcgacgagatctttgcgttttctcagcgatctgatggactaattattagcacgccaacaggctccaccgcctattccctctctgcaggcggtcctattctgaccccctctctggatgcgattaccctggtgcccatgttcccgcatacgttgagtgcacgaccactggtcataaacagcagcagcacgatccgtctgcgttttagccatcgccgtaacgacctggaaatcagttgcgacagccagatagcactgccgattcaggaaggtgaagatgtcctgattcgtcgctgtgattaccatctgaatctgattcatccgaaagattacagttatttcaacacattaagcaccaagctcggctggagtaaaaaattattctaattttacgccagcctctttactgtatataaaaccagtttatactgtacacaataacagtaatggtttttcatacaggaaaacgactatgttggcacaactgaccatcagcaactttgctatcgttcgtgagcttgagattgattttcatagcggcatgaccgtaataactggcgagaccggcgcgggtaaatctattgcaatagatgccctcggtctttgtctcggtggtcgcgctgaagccgacatggtgcgtaccggcgctgctcgcgctgacctgtgcgcccgtttttctctgaaagatacgccagcggctctgcgctggctggaagaaaaccagcttgaagacgggcatgaatgtttgcttcgtcgcgtgatcagcagcgatggtcgctcccgtggtttcatcaacggtacagctgttcctctgagtcaactgcgcgaactgggtcagttgctgattcagatccatggtcagcacgctcatcaattactcaccaaacctgagcaccaaaaattcctgcttgatggctatgccaatgaaacctctctactgcaggaaatgaccgcacgttatcagttgtggcatcaaagctgccgtgacctcgcgcatcatcaacagttaagtcaggaacgcgccgcccgtgcggaactgctgcaataccaattaaaagaacttaacgaatttaatccgcagcccggagagtttgaacaaatcgacgaagagtacaaacgtctggcgaacagcggtcaattgctgaccaccagccagaatgcattggcattaatggccgacggtgaagacgcaaacctgcaaagtcagctttacacggctaaacaactggtgagcgaattgattggcatggacagcaaactgtccggcgtacttgatatgctggaagaagctaccatccagattgctgaagccagcgatgaactgcgccactactgcgatcgtctggatctcgatcccaaccgactatttgaacttgaacagcgcatcagtaaacagattagcctggcacgtaaacatcacgtcagccctgaggcattgccacagtattaccagagcctactggaagaacagcagcaactggacgatcaggccgacagtcaagaaacgcttgcgctggcggtaacgaaacatcatcagcaggcactggaaatcgcgcgcgcattacaccaacaacgccagcaatatgcagaagaacttgcacagctgatcaccgacagtatgcatgcgctcagtatgccgcatgggcagtttacgatcgatgttaaatttgacgagcatcacctgggcgctgacggtgccgatcgtattgagtttcgggtaaccaccaacccaggtcagccaatgcagcctattgccaaagtcgcatccggtggtgaattgtcccgcatcgcactggcaatccaggtcatcacggcgcgtaaaatggaaaccccggcactgatttttgatgaagtggatgtagggattagcggtccaacagcggcagttgtcggcaaactgctgcgtcaactcggcgaaagtactcaggtgatgtgtgttacccacctgccacaagtcgcgggatgtggtcatcaacactattttgtcagcaaagaaaccgatggtgcgatgacagaaacgcatatgcaatccctgaataaaaaagcgcggttacaagagctggcgcgcctgcttggtggcagtgaagtcacacgtaatacactggcgaatgcgaaagaactgcttgcagcgtaaacttttttcctgcttcacggtcagagtaaacagcaaaacgccgtaagaccggaaagcaaaaggttttaaagtgatgaaaggtctattatcatcggcatattacagatgagccacgtactgctcgggcccgaaaaggaatcaaatcactatgcgctgtaaaacgctgactgctgcagcagcagtactattgatgttgaccgcaggctgttccactctggagcgagtggtttaccgtcctgacatcaaccaggggaactatctgaccgctaacgacgtatccaaaatacgtgttggcatgacgcaacaacaagttgcgtacgcattgggtacaccgctgatgtccgatccatttggtacgaatacctggttctatgtcttccgccagcaaccaggtcatgaaggtgtaactcagcaaacgctgacgctgacctttaacagtagcggtgtgttgaccaatattgataacaaacctgcgctgagtggtaactaataataaagttgctctcaaagacgttaaaaaaggtgctcaatgagcaccttttttctgtctgttatttattcgcacttttttctgctcgttgcctgcgaagctctttcggatcggcaatgagagggcgataaatctccacccgatcgccatcatgcacactatcgcttagttttgccggacggctgtaaatgccgactttgtttttagttaaatcgatatcggtacgcaattccagcaagccactggcgcgaatagcttcttcaaccgtcgcgccctcctgcagcgtcactcgctgcaggtactgcttctcaggtagcgcataagccacctcaacggcaattttacctggcactgtaaacctctttcgcacgaaccgtaaaagcctggaccatattagccgccagctctttaaacacgcgaccaaaggcgagttcaatcaacttattggtaaactcaaagtcgagatgaaactcgatacgacacgcctcctggctcagcggcgtaaacttccatccaccaatcaatttcttgaacggcccatccaccagattcataagaatactttggttactggtcaactggttgcgggtagtaaacgttttgctgatcccagccttagagacatctaccgccgcagtcatctgcccaggagtggactccagaatccgacttccggtacaacccggcaaaaactgaggataagactgaacgtcattcactaactgatacatttgctccgcgctgtagggtaccagtgcggtccggctaatctgaggcataacaatttccatcaacaaaaatccaacaaataatatcatttatcctgctgtaaaaaaaacgctatcccggcgctgggtaacatcgggttcatgctaagatagagccttgtcccccgcaggattgatatggggtgttttcgatttcagattaccgatgattcacgacgcttatgacgaagaaaaaagcacataaacctggtagtgcgaccatcgcgcttaacaagcgcgcccgtcacgaatactttatcgaagaagagttcgaagcgggacttgccctgcaaggctgggaagttaaatccctgcgcgcaggaaaagccaatatcagcgacagctacgtccttctgcgtgacggagaggcatttctgtttggcgctaacatcacgccaatggccgtggcctccacgcatgtggtgtgcgatcctacccgtacccgcaagttacttctcaaccagcgcgaactggacagtttgtacggtcgcgtcaatcgagaaggctataccgtagtggcgctctccctgtactggaaaaatgcctggtgcaaagtgaaaatcggcgtcgccaaaggtaagaaacagcacgataaacgtagtgatatcaaagagcgcgaatggcaggtggataaagcacgtatcatgaaaaacgcccaccgttaaacctgcactccaattattgaccagttcctcaccgcgcctccctctccggcggcgcgaatgaacatcttattggctatcacatccgacacaaatgttgccatcccattgcttaatcgaataaaaatcaggctacatgggtgctaaatctttaacgataacgccattgaggctggtcatggcgctcataaatctggtatacttacctttacacattggggctgattctggattcgacgggatttgcgaaacccaaggtgcatgccgaggggcggttggcctcgtaaaaagccgcaaaaaatagtcgcaaacgacgaaaactacgctttagcagcttaataacctgcttagagccctctctccctagcctccgctcttaggacggggatcaagagaggtcaaacccaaaagagatcgcgtggaagccctgcctggggttgaagcgttaaaacttaatcaggctagtttgttagtggcgtgtccgtccgcagctggcaagcgaatgtaaagactgactaagcatgtagtaccgaggatgtaggaatttcggacgcgggttcaactcccgccagctccaccaaaattctccatcggtgattaccagagtcatccgatgaagtcctaagagcccgcacggcgcaagccctgcgggcttttttgtgccctcaatttgtcccgcgaagtccgaagagaactaattaaatccgaaccttttaggcccattgataggcccaacgaaaagctctattgtttacgttgggctaaacgcagggagactccccacctttgaaaacaggatgtagcgatgaaacttaacgacagtaacttattccgccagcaggcgttgattaacggggaatggctggacgccaacaatggtgaagccatcgacgtcaccaatccggcgaacggcgacaagctgggtagcgtgccgaaaatgggcgcggatgaaacccgcgccgctatcgacgccgccaaccgcgccctgcccgcctggcgcgcgctcaccgccaaagaacgcgccaccattctgcgcaactggttcaatttgatgatggagcatcaggacgatttagcgcgcctgatgaccctcgaacagggtaaaccactggccgaagcgaaaggcgaaatcagctacgccgcctcctttattgagtggtttgccgaagaaggcaaacgcatttatggcgacaccattcctggtcatcaggccgataaacgcctgattgttatcaagcagccgattggcgtcaccgcggctatcacgccgtggaacttcccggcggcgatgattacccgcaaagccggtccggcgctggcagcaggctgcaccatggtgctgaagcccgccagtcagacgccgttctctgcgctggcgctggcggagctggcgatccgcgcgggcgttccggctggggtatttaacgtggtcaccggtagcgcgggcgcggtcggtaacgaactgaccagtaacccgctggtgcgcaaactgagctttaccggtagcaccgaaattggccgccagttaatggaacagtgcgcgaaagacatcaagaaagtgagcctggagctgggcggtaacgcgccgtttatcgtctttgacgatgccgacctcgacaaagccgtggaaggcgcgctggccagcaaattccgcaacgccgggcaaacctgcgtctgcgccaaccgcctgtatgtgcaggacggcgtgtatgaccgttttgccgaaaaattgcagcaggcagtgagcaaactgcacatcggcgacgggctggataacggcgtcaccatcgggccgctgatcgatgaaaaagcggtagcaaaagtggaagagcatattgccgatgcgctggagaaaggcgcgcgcgtggtttgcggcggtaaagcgcacgaacgcggcggcaacttcttccagccgaccattctggtggacgttccggccaacgccaaagtgagcaaagaagagacgttcggccccctcgccccgctgttccgctttaaagatgaagctgatgtgattgcgcaagccaatgacaccgagtttggccttgccgcctatttctacgcccgtgatttaagccgcgtcttccgcgtgggcgaagcgctggagtacggcatcgtcggcatcaataccggcattatttccaatgaagtggccccgttcggcggcatcaaagccagcggtctgggtcgtgaaggtagcaagtatggcatcgaagattacttagaaatcaaatatatgtgcatcggtctttaactggagaatgcgaatgaacagcaataaagagttaatgcagcgccgcagtcaggcgattccccgtggcgttgggcaaattcacccgattttcgctgaccgcgcggaaaactgccgggtgtgggacgttgaaggccgtgagtatcttgatttcgcgggcgggattgcggtgctcaataccgggcacctgcatccgaaggtggtggccgcggtggaagcgcagttgaaaaaactgagccacacctgcttccaggtgctggcttacgagccgtatctggagctgtgcgagattatgaatcagaaggtgccgggcgatttcgccaagaaaacgctgctggttacgaccggttccgaagcggtggaaaacgcggtaaaaatcgcccgcgccgccaccaaacgtagcggcaccatcgcttttagcggcgcgtatcacgggcgcacgcattacacgctggcgctgaccggcaaggtgaatccgtactctgcgggcatggggctgatgccgggtcatgtttatcgcgcgctttatccttgcccgctgcacggcataagcgaggatgacgctatcgccagcatccaccggatcttcaaaaatgatgccgcgccggaagatatcgccgccatcgtgattgagccggttcagggcgaaggcggtttctacgccagcagcccagcctttatgcagcgtttacgcgctctgtgtgacgagcacgggatcatgctgattgccgatgaagtgcagagcggcgcggggcgtaccggcacgctgtttgcgatggagcagatgggcgttgcgccggatcttaccacctttgcgaaaagcatcgcgggcggcttcccgctggcgggcgtcaccgggcgcgcggaagtaatggatgccgtcgctccaggcggtctgggcggcacctatgcgggtaacccgattgcctgcgtggctgcgctggaagtgttgaaggtgtttgagcaggaaaatctgctgcaaaaagccaacgatctggggcagaagttgaaagacggattgctggcgatagccgaaaaacacccggagatcggcgacgtacgcgggctgggggcgatgatcgccattgagctgtttgaagacggcgatcacaacaagccggacgccaaactcaccgccgagatcgtggctcgcgcccgcgataaaggcctgattcttctctcctgcggcccgtattacaacgtgctgcgcatccttgtaccgctcaccattgaagacgctcagatccgtcagggtctggagatcatcagccagtgttttgatgaggcgaagcagtaacgccgctcctatgccggaggcgacgctgcgcgtcttgtccggcctacggggatccaggtcggataaggcgtttacgccgcatccgacaatctgtacgtgaacaggaagaaatctatgttggccgggtaaggcggagccgctctccggcaaaaagaatcaataacaattatacgcgtgacccggcgcgggaaatgtcggggcgctctcccaagtgacacactttcgagaggattcaggatggggcaaagtagccaaccacatgagttaggcggcgggctgaagagtcgccacgtcaccatgttgtctattgccggtgttatcggcgcaagtctgtttgtcggttccagcgtcgccatcgccgaagcgggcccggcggtattactggcctatctgttcgccgggctactggtggttatgattatgcggatgttggcggaaatggcggttgccacgcccgataccggtagcttttccacctatgccgataaagccattggtcgctgggcgggctataccatcggctggttgtactggtggttttgggtactggttatcccgctggaagccaacatcgccgccatgatcctgcacagttgggttccaggcattcccatctggttattttccctcgtcattaccctcgccttaactggcagtaacttattaagcgttaaaaactacggcgaatttgagttctggctggcgctgtgcaaagtcatcgctatcctggcctttattttccttggtgcagtcgcaattagcggtttttacccgtatgccgaagtgagcgggatcagtagattgtgggatagcggcggctttatgcccaacggtttcggtgcggtattaagcgcgatgttgatcaccatgttcagctttatgggcgcagaaattgtcaccattgccgccgcggaatccgacacgccggaaaaacatattgtccgcgccaccaacagcgttatctggcgtatttctatcttctatttatgttctatttttgtcgtcgtggcattaattccgtggaatatgcccggactaaaagccgtcggttcttatcgcagcgtactggaattgctcaatattccccatgcgaaattaatcatggactgcgtgatattactttccgtaaccagttgcctgaacagcgcgctgtataccgcgagtaggatgctctactccttaagtcgtcgcggtgatgctcccgcggtaatgggtaaaatcaaccgcagtaaaaccccgtacgtggcggtgttactctccaccggcgcggcattcttaacggtggtggtgaactattacgcgcctgcgaaggtatttaaatttctgatcgacagctccggcgctatcgccctgctggtttatttagtcatcgccgttagtcagttgcggatgcgcaaaattctgcgagcagaaggaagcgaaattcgcttgcgaatgtggctttatccgtggctcacctggctagtcatcggctttattacctttgtgttggtagtgatgctattccgtccggcgcaacagttagaagtgatctccaccggcttattagcgatagggattatctgtaccgtgccaattatggctcgctggaaaaagctggtattgtggcaaaaaacacccgttcataatacgcgctgatcatgatcaggagtcacaccatgaccattacgtctctggatggctatcgctggctgaagaacgatattattcgcggtaattttcaaccggatgaaaaattacgaatgagtttgctgacaagccgttatgcacttggcgttgggccgttacgggaagctcttagccaactggtggcggaacggctggtcacggtggtgaatcaaaaagggtatcgggtggcgtctatgagtgagcaggagctgctcgatattttcgacgcccgcgccaatatggaagcgatgttagtgagtctggcgattgcccgcggtggcgatgagtgggaggcagacgttctcgcaaaagcgcatctgctgagtaagcttgaggcctgtgacgccagcgagaaaatgcttgatgagtgggatctgcgtcatcaggcgtttcatacggcaattgtggcgggctgtggttctcactatttgctgcaaatgcgtgaacggttgtttgatctggcggcgcgttatcgatttatctggctgcggcgaacggtgcttagcgtggaaatgctggaggataaacacgatcagcaccagaccctgactgcggcggtactggcgcgagataccgcgcgcgccagtgagttaatgcgccagcatttactgacgccaattcccattatccagcaggcgatggctggcaattaattactcttccggaatacgcaacacttgccccggataaattttatccgggctttttagcatcggtttattcgcttcgaagattttattgtacagattagcgttaccgtagacctgtttggaaatggcactcagagtgtcgccagacttaacggtataaaactggctggcagtggctggtgtcgccgttttcacctgatcatcgacactggcaataccggaaatattccccaccgcaacaaggattttctccttcgcctcctgactcaggccgtcaccagtgaccgtcgctttgccgtcggcaatttgaatattcactttatcggcatccggtataccggttttgttcagatgctcctgcaccttcttcgcctgatcgtctttatcgtgctgacctgtaaccgcgtcccagagtttttctccggcatctttcacaaaattgaacagacccatagctacctcattcgttaacggaaacactcagaaagtgtagcagaggaacgcggcgcgttaacgccgcggggatgagcacaggtttaatcgcgggtttgcacccagaacgcgtgaatcaaaccggggatatacccaagcagtgtcaacagaatattaataatgaacgcccaaccgaaccctttaccgagcagcacgccgagcggcggcagaatgatggtgatgacgattctccagaaacccatatgtactccctataagaaaattactcattgtttaaaaagagattttatctcttaagcgtagtaattttagcggagcctgccagtttcagcttacgcttttactctcatttacgctgctgaggctggtatatgttgcatttttagtttagagtttacttaatttagaaaatacttaaataaatatgactgaactcgcgcaattacaggccagtgccgaacaggcagcggccttattgaaagcaatgagccaccctaaacgattgctgattctgtgcatgcttagcggttcccccggcaccagcgcgggagagctgacgcgcattaccggactgagtgcctctgcgacaagtcagcatctcgctcgtatgcgggacgaagggcttatcgacagccaacgggatgcccaacgcattctatattccattaaaaatgaggcggtaaatgccattatcgccaccctgaaaaatgtctattgtccgtaaggagtcactatggctttgacaaccattagcccgcatgatgcacaagaattaatcgcacgcggcgcaaagttaatcgatattcgtgatgctgatgaatatcttcgtgaacatattcctgaagcagatctggctccattatccgtgctggaacagagtggtcttccggctaaattacgtcacgagcaaattatattccactgccaggcaggtaaacgcaccagtaataatgccgataaattagcagcgattgccgcccccgcagaaatctttttactcgaagatgggattgatggctggaaaaaagcaggattgccagtagcggtaaataaatctcaacccttgccgttaatgcgccaggtgcagatcgctgcgggtggtttaatattaatcggcgttgtactgggttataccgtaaatagcggtttcttcttattaagtggctttgttggtgccgggttactgtttgcaggaatcagcggtttttgtggaatggcaaggttgttagataagatgccgtggaaccaacgagcttgagaagcgacgccggacgcgccctagcagcgacatccggcctcagtaattagatcaggaaatcgtcgagagatttaccttctgccagcgcctgagcaattggcttcggtgtacggccctgaccggtccaggttttagtttcaccgttaacatcggtgaatttatatttcgccggacgcggctggcgttttttaccagcgcgtggtgcagcagcagagctattacccaataactcttccgggttaattccgtcagctttcatcagctccagccaggtgctaattttttcctggcgctctgccagttcacgctgctgctgttcttcttcttcacgtctttctttagtgacaaccctgaatttttcgagcatttcttcaagaacgtcaatggagaattcgcgagccatcgcacggagggtgcgaatgttatttaaactttgtaacattacggacataataaagaaaaccttttaacgccaaaacaaaaaaagtatttcgtcgcgtagtgtaagcgatcacttattatatttccacaaaatttaatctatttacagtcctgcgcgagattatttcagctgttattttctgaaactctcagaataatttcaagattatatattagccattttgatgagtaatttagattattggtgaacagagcggcgctctctgctcgctaattccgcaagcctgacaaaatcaaagtgaataaaaatgcaatataacagaataaaagaaaacatccatcactggtgctttctgctgttaatgtacattgtctggcataaaaaatgctgaaaatgacccagctactacatacaccgaattctctacgcttatagcgttacctcacccccaaactttcattagtgatattaaaggtaaggccatatctaattgatttaattaaaaataaatcatatcggcatgtaaaaatccacaatgtacaaaaaacgagccgttacggaatattttatctacaaaaactgactaaataaaaatttttcactaattgattagtcatagccagcgatatacgctatgcgaaaatgcagatggcaatgagatccactgctttcatctccattaacatcccattacgcttttattaaggagcattagcatgttcagtccgcagagtcgcttgcgtcatgcagttgcagatacgttcgcgatggttgtttactgttctgtcgtgaacatgtgtattgaagttttcctctccggaatgagcttcgaacagtctttttattccagattggtagcgattccggtgaacatcttaattgcatggccatacggtatgtaccgtgatctgtttatgcgcgcggcacgcaaagttagcccgagcggctggataaaaaatctggcggatatcctggcttatgtgacgttccagagtccggtgtatgtggcgatcttgttagtggtgggcgcagactggcatcagattatggcggcggtcagtagtaacatcgttgttagcatgttgatgggggcggtttatggctacttcctcgattattgccgccgactgtttaaagtcagccgttaccagcaggtaaaagcctgactcttcttttcgcgactggcatcgccagtcgcgtctttaactggcttcgccaaataaaccattcaaataacgttcaagcgcaacacggctactaaagccatgcgggataccgtaatgctcgtgtcgctcgcctgctaaatagagcggaaattgctggtaatgatcgcaagttttaatatcggaagcgggttcagccagtgtgctactgcgttcttttaatgttggatgaattaccagagcggtacgtcccattcgcgcttcgcgattaacatagacataattttccccacggcggtaaccatacgctttctgggttaccacatcgacagtaaaaccgactttttcaagtacgcgcgccacctcgtctggtcgtaaatacatatttgatcctcgttattatcaaccgcgggcctaccttacctgattgcgcattcacaacgctttcagaaaagtccataaagccgcgatgaacctcagttaagaaaattatggtctacactgaaaattacatcgaattctaatgggggatcatatgtttaaccgaccgaaccgcaacgacgttgatgatggcgtgcaggatatccagaatgatgtcaatcaattagctgacagcctcgaatctgtattgaagtcctggggcagcgacgccaaaggggaagctgaagccgcacgcagtaaagctcaggcattgctgaaagaaaccagggcgcgaatgcatggtcgtactcgcgtccagcaagccgcgcgcgatgccgttggctgcgcggattcttttgttcgtgaaagaccctggtgtagcgtgggtacagcagctgcggtaggtatttttatcggcgcactgttaagcatgcgcaaaagctaatgcaaaaatgataataaatacgcgtctttgaccccgaagcctgtcttcggggtttctttttgcctggtgaatcacaaaaatccccctaccccgtcacgctcatatccagggtaatttcgaccactatttgctatatattgtgtggttgaatcttttttcaactacatctagtatctctgtatcaacagagagacaacccgacgcgtatcatcgcgccgtatcttcattttaaacggaaatacgaatcatgcgcattactatttacactcgtaacgattgcgttcagtgccacgccaccaaacgggcgatggaaaaccggggctttgattttgaaatgattaatgtcgatcgcgttcctgaagcggcagaagcgttgcgtgctcagggctttcgtcagttgccggtagtgattgctggcgatcttagctggtctggtttccgtccggacatgattaaccgtctgcatccagcgccacacgcggccagtgcatgagccagctcgtctacttctccagcagctccgaaaacacgcagcgttttatcgaacgtttaggtctgcccgcggtgcgcatcccgctcaatgagcgggaacggattcaggtagacgagccttacatcctgatcgtgccctcttacggcggcggcggtacggctggcgcggtgccacgacaggtaattcgctttttaaacgacgagcacaaccgggcgttgcttcgcggcgttattgcttctggtaatcgcaactttggtgaggcgtatggccgcgccggagatgtgattgcccggaaatgcggcgtgccgtggctgtaccgttttgaactcatgggtacgcaaagcgatatcgaaaacgttcgtaaaggagtaaccgaattttggcaacgacaaccgcagaatgcctgacgcaggaaacgatggattaccacgcgctgaatgcgatgcttaacctctacgatagcgcaggtcgcattcagttcgataaagaccgccaggccgttgacgcctttattgcgacgcatgtgcgtccgaacagtgtgaccttcagtagccagcagcagcgcctgaactggctggtcaacgaaggttactatgatgaaagcgttcttaatcgctactctcgcgactttgtcattacgctgtttacccacgcacacaccagcggttttcgtttccagacattcctcggggcatggaagttttacaccagctatacgttgaagacattcgacggtaaacgttatctggaagattttgccgatcgagtaacgatggtggcgctgacgctggcacaaggcgatgagacgctggcgttgcaactgaccgatgaaatgctgagtggacgctttcagccagccacgccaacattcctcaactgcggtaagcagcagcgcggcgaactggtttcctgttttttgctgcgtattgaagacaatatggagagcattggtcgggcggtaaattccgcactgcagctgagcaaacgcggcggcggcgtagcatttttgctgagcaatctgcgagaagcgggcgcgccaattaaacgtattgaaaatcaatcttctggcgtaattccggtgatgaaaatgctggaagacgcattttcctatgccaaccaactcggcgctcgtcagggggctggtgcagtctatttacatgctcatcatcccgatattctgcgttttctcgacacgaaacgggaaaatgccgacgaaaaaatccgcattaaaacactgagccttggcgtggtgatcccggatatcactttccatctggcaaaagagaatgcgcagatggcgctgtttagcccttatgacgtagagcgagtttatggcaagccgtttgccgatgtggccatcagccaacactatgacgaactggttgccgatgaacgcattcgcaaaaaatacctcaacgcccgtgatttcttccagcgactggcagaaatccagtttgagtccggctatccctacatcatgtatgaagacacggtaaaccgtgctaaccctatcgccgggcgcataaatatgagtaatctctgcagtgaaattttgcaggttaacagcgccagtgagtatgacgagaatctcgactatacccgcacaggccatgatatttcctgcaatttaggtagcttgaatattgcgcacaccatggattcccccgattttgcccgcacggtagagactgccgtgcgcggtttaacggcagtaagtgatatgagtcatatccgcagcgtgccgtccatcgaagccggaaatgccgccagccacgccatcggactggggcagatgaatttacacggctatctggcgcgagaaggcatcgcttatggtagcccggaagcactggatttcaccaatctctatttctatgccatcacctggcatgcactgcgtaccagcatgttgctggcacgcgaacgcggtgaaaccttcgccgggttcaaacagagtcgctatgccagtggtgaatattttagccaatatctgcaagggaactggcagccgaaaacggcgaaagttggcgaactgtttacccgtagcggtattacgttacctacccgtgagatgtgggcgcagctgcgcgacgacgtgatgcgctacggcatatacaaccagaatcttcaggcggtgccgccaaccggttctatctcttatatcaaccatgctacgagcagtattcatccgattgtggcgaaagtagagatacgcaaagagggcaaaacaggacgcgtttactaccctgccccgtttatgactaacgagaatctggcgctgtatcaggacgcttacgaaattggcgcagaaaagatcatcgacacctacgcggaagcgactcgccatgtcgatcaggggctgagcctgacgctttttttccccgataccgccaccactcgcgatatcaacaaagcgcagatttacgcctggcgcaagggtatcaaaacgctctattacatccgcctgcgtcagatggcgctggaaggcactgaaattgaaggctgcgtctcctgtgcactttaaggaatatctatgaaactcagtcgtatcagcgccatcaactggaacaagatatctgacgataaagatctggaggtgtggaatcgcctgaccagcaatttctggctaccagaaaaggtgccgctgagcaacgatattcctgcctggcagacattaactgtcgtagaacaacaactgacgatgcgcgtttttactggcctgacgctgctcgacacgctgcaaaatgttatcggcgcgccttctctgatgcccgatgcactcacgcctcatgaagaagcggtattaagcaatatcagctttatggaagcggttcatgcccgctcttacagtagcattttcagcacgctatgccagaccaaagatgtcgatgccgcctacgcctggagtgaagaaaacgcaccgttgcagcgaaaagctcagattattcagcaacattatcgcggtgatgatccgctgaaaaagaaaatcgccagtgtgtttcttgaatcttttttgttctattccggtttctggctgccgatgtatttttccagccgcggaaagctgaccaataccgcggacctgatccgtctgattatccgcgatgaagcagtccacggttactacataggctataaatatcagaaaaacatggaaaagatatctctgggacaacgtgaagagttgaagagtttcgccttcgatttgttgctggaactctacgacaacgagttgcaatacaccgatgagctgtacgccgaaaccccgtgggctgacgatgtgaaagcgtttctctgttacaacgccaataaggctttgatgaatctgggctacgaaccgttatttcccgcagaaatggcggaagtgaatccggcaatcctcgccgcgcttagcccgaatgccgatgaaaatcacgatttcttttccggtagtggctcctcttatgtgatggggaaagcggttgaaacagaagatgaagactggaatttctgagggtgttattttcaaaaatatcactacccgcagcagggaaataattcccgccaaatagctttttatcacgcaaataatttgtggtgatctacactgatactctgttgcattattcgcctgaaaccacaatattcaggcgttttttcgctatctttgacaaaaaatatcaactttctcgatttgctctcagcccttatatcacgggaaattccggcgatttgctcgcatcaatattcatgccacatttgccatcaggggttgcctcagattctcagtatgttagggtagaaaaaagtgactatttccattgggtaatatatcgacatagacaaataaaggaatctttctattgcatggcaattaaattagaaattaaaaatctttataaaatatttggcgagcatccacagcgagcgttcaaatatatcgaacaaggacttagtaaagaacaaattctggaaaaaactgggctaagccttggcgtaaaagacgccagtctggccattgaagaaggcgagatatttgtcatcatgggattatccggcagcggtaaatccacaatggtacgccttctcaatcgcctgattgaacccacccgcgggcaagtgctgattgatggtgtggatattgccaaaatatccgacgccgaactccgtgaggtgcgcagaaaaaagattgcgatggtcttccagtcctttgccttaatgccgcatatgaccgtgctggacaatactgcgttcggtatggaattggccggaattaatgccgaagaacgccgggaaaaagcccttgatgcactgcgtcaggtcgggctggaaaattatgcccacagctacccggatgaactctctggcgggatgcgtcaacgtgtgggattagcccgcgcgttagcgattaatccggatatattattaatggacgaagccttcagcgcgctcgatccattaattcgcaccgagatgcaggatgagctggtaaaattacaggcgaaacatcagcgcaccattgtctttatttcccacgatcttgatgaagccatgcgtattggcgaccgaattgccattatgcaaaatggtgaagtggtacaggtcggcacaccggatgaaattctcaataatccggcgaatgattatgtccgtaccttcttccgtggcgttgatattagtcaggtattcagtgcgaaagatattgcccgccggacaccgaatggcttaattcgtaaaacccctggcttcggcccacgtagcgcactgaaattattgcaggatgaagatcgcgaatatggctacgttatcgaacgcggtaataagtttgtcggcgcagtctccatcgatagccttaaaaccgcgttaacgcagcagcaaggtcttgatgcggcgctgattgatgcgccgttagcagtcgatgcacaaacgcctcttagcgagttgctctctcatgtcggacaggcaccctgtgcggtgcccgtggtcgacgaggaccaacagtatgtcggcatcattagcaaaggaatgctgctgcgcgctttagatcgtgagggggtaaataatggctgatcaaaataatccgtgggataccacgccagcggcggacagtgccgcgcaatccgcagacgcctggggtacaccgacgactgcaccgactgacggcggtggtgctgactggctgaccagtacgcctgcgccaaacgtcgagcattttaatattctcgatccgttccataaaacgctgatcccgctcgacagttgggtcactgaagggatcgactgggtcgttacccatttccgtcccgtcttccagggcgtgcgcgttccggttgattatatcctcaacggtttccagcaattgctgctgggtatgcccgcaccggtggcgattatcgttttcgctctcatcgcctggcagatttccggggtcggaatgggtgtggcgacgctggttagcctgattgccatcggcgcaatcggtgcctggagccaggcaatggtgactctggcgctggtgttaaccgccctgctgttctgtatcgtcatcggtttgccgttggggatatggctggcgagaagtccgcgagcggcgaaaattattcgtccactgcttgatgccatgcagaccacgccagcgtttgtttatctggtgccaatcgtcatgctatttggtatcggtaacgtgccgggcgtggtggtgacgatcatctttgctctgccgccgattatccgtctgaccattctggggattaaccaggttccggcggatctgattgaagccagccgcagtttcggtgccagcccgcgccagatgctgttcaaagttcagttaccgctggcgatgccgaccattatggcgggcgttaaccagacgctgatgctggccctttctatggtggtcatcgccagcatgattgccgtcggcgggttgggtcagatggtacttcgcggtatcggtcgtctggatatggggcttgccaccgttggcggcgtcgggattgtgatcctcgccattatcctcgatcgtctgacgcaggccgttgggcgcgacagtcgcagtcgcggcaaccgtcgctggtacaccactggccctgttggtctgctgacccgcccattcattaagtaactctgcacttgcccggtgacgccgggcattatcaccctgccaaaaaaaggaataacaatgcgacatagcgtactttttgcgacagcgtttgccacgcttatctctacacaaacttttgctgccgatctgccgggcaaaggcattactgttaatccagttcagagcaccatcactgaagaaaccttccagacgctgctggtcagtcgtgcgctggagaaattaggttataccgtcaacaaacccagcgaagtagattacaacgttggctacaccagccttgcttccggcgatgcaaccttcaccgccgtgaactggacgccactgcatgacaacatgtacgaagctgccggtggcgataagaaattttatcgtgaaggggtatttgttaacggcgcggcacagggttacctgatcgataagaaaaccgccgaccagtacaaaatcaccaacatcgcacaactgaaagatccgaagatcgccaaactgttcgataccaacggcgacggaaaagcggatttaaccggttgtaaccctggctggggctgcgaaggtgcgatcaaccaccagcttgccgcgtatgaactgaccaacaccgtgacgcataatcaggggaactacgcagcgatgatggccgacaccatcagtcgctacaaagagggcaaaccggtgttttattacacctggacgccgtactgggtgagtaacgaactgaagccgggcaaagatgtcgtctggttgcaggtgccgttctccgcactgccgggcgataaaaacgccgataccaaactgccgaatggtgcgaattatggcttcccggtcagcaccatgcatatcgttgccaacaaagcctgggccgagaaaaacccggcagcagcgaaactgtttgccattatgcagttgccagtggcagatattaacgcccagaacgccattatgcatgacggcaaagccagtgaaggcgatattcagggacacgttgatggttggatcaaagcccaccagcagcagttcgatggctgggtgaatgaggcgctggcagcgcagaagtaatttttattcgggcggataaggcgtttttgccgcatccgccgttctgtgcacaatgcctgatgcgacgctggcgcgtcttatcatgcctacaaaccacatcgcacatttcaacaatctatctttcatcccatattcatcaacatccgctattattgatttccagcttaatcatcacctgatgaacaaaaataatgactaaacctaatcatgagcttagcccggcgctgatcgtgctgatgtctatcgccaccggtctggcggtagccagtaactattacgcccagccattgctcgacaccatcgcgcgtaacttttccctttccgccagtagcgcaggctttattgttaccgccgcgcagttgggctatgccgcaggtctactgtttcttgttcccctcggtgatatgtttgaacgccgccgcctgattgtcagcatgaccttactggcggcatgttgattaccgccagcagtcagtcgctggcgatgatgatcctcggtacggcattaaccggtttattcagtgtcgtggcacaaattctggttccgctggcagcgacgctggctagtccggataaacgcggcaaagtggttggcactattatgagcggtctgctgttggggatcttgctggcacggacagttgccggattgctggcgaatctcggcggctggcgcaccgtcttttgggttgctagcgtgttaatggcactgatggcgctggcattatggcgtggtctgccacaaatgaaaagtgaaacccacctcaactacccacagttgttgggttccgttttcagtatgtttatcagcgataaaattctgcgtacccgcgcgttgctgggctgcctgacctttgccaatttcagcattctctggaccagtatggcctttttgcttgccgctccaccttttaactacagcgatggtgtcattggtctgtttggacttgcgggagctgccggagcgttgggcgctcgtccggcgggcggttttgccgataagggcaaaagccaccacaccacaactttcggtctgctgctgctattacttagttggctggcgatctggtttggtcacacttccgtactggcgttgattatcggaatcctggtgctggatctcaccgtgcagggcgtgcatatcactaaccagacggtaatttatcggatacatcctgatgcgcgcaatcgcctgaccgcaggttacatgactagctactttattggcggtgccgccggtagcctaattagtgccagtgcctggcaacatggcggttgggctggcgtttgtctggctggcgcgacgattgccctggttaacttactggtctggtggcgaggttttcatcgtcaggaagccgcaaattaagcaatcagcaaccgttttcgtggctttacacttataagggtgttaagaagcccatcagtctgataaggttaagatattcattcagtctatttataatattaacaatcgttaagcgtacactctatggaaagccctactccacagcctgctcctggtagcgcgaccttcatggaaggatgcaaagacagtttaccgattgttattagttatattccggtggcctttgcgttcggtctgaatgcgacccgtctgggattctctcctctcgaaagcgtttttttctcctgcatcatttatgcaggcgcgagccagttcgtcattaccgcgatgctggcagccgggagtagtttgtggattgctgcactgaccgtcatggcaatggatgttcgccatgtgttgtatggcccgagtctgcgtagccgtattattcagcgtctgcaaaaaagcaaaaccgccctgtgggcgtttggcctgacggatgaggtttttgccgccgcaaccgcaaaactggtacgcaataatcgccgctggagcgagaactggatgatcggcattgccttcagtagttggagtagctgggtatttggtacggtaataggggcattctccggcagcggcttgctgcaaggttatcccgccgttgaagctgcattaggttttatgcttccggcactctttatgagtttcctgctcgcctctttccagcgcaaacaatctctttgcgttaccgcagcgttagttggtgcccttgcaggcgtaacgctattttctattcccgtcgccattctggcaggcattgtctgtggctgcctcactgcgttaatccaggcattctggcaaggagcgcccgatgagctatgaggttctgctgcttgggttactagttggcgtggcgaattattgcttccgctatttgccgctgcgcctgcgtgtgggtaatgcccgcccaaccaaacgtggcgcggtaggtattttgctcgacaccattggcatcgccagcatatgcgctctgctggttgtctctaccgcaccagaagtgatgcacgatacacgccgtttcgtgcccacgctggtcggcttcgcggtactgggtgccagtttctataaaacacgcagcattatcatcccaacactgcttagtgcgctggcctatgggctcgcctggaaagtgatggcgattatataacccacaagaatcatttttctaaaacaatacatttactttatttgtcactgtcgttactatatcggctgaaattaatgaggtcatacccaaatggatagtagctttacgcccattgaacaaatgctaaaatttcgcgccagccgccacgaagattttccttatcaggagatccttctgactcgtctttgcatgcacatgcaaagcaagctgctggagaaccgcaataaaatgctgaaggctcaggggattaacgagacgttgtttatggcgttgattacgctggagtctcaggaaaaccacagtattcagccttctgaattaagttgtgctcttggaagttcccgtaccaacgcgacgcgtattgccgatgaactggaaaaacgcggttggatcgaacgtcgtgaaagcgataacgatcgccgctgcctgcatctgcaattaacggaaaaaggtcacgagtttttgcgcgaggttttaccaccgcagcataactgcctgcatcaactctggtccgcgctcagcacaacagaaaaagatcagctcgagcaaatcacccgcaaattgctctcccgtctcgaccagatggaacaagacggtgtggttctcgaagcgatgagctaacgcgtcatctcgctcaaaaatccagatttataaaagaaaaaatgactggccagcatcgcaacatgctggcctttttggcaagcaggtcggctcagccgatgagttaagaagatcgtggagaacaatatgagcgcaaatgcggagactcaaaccccgcagcaaccggtaaagaagagcggcaaacgtaagcgtctgctcctccttctcaccttgctctttataattattgccgtagcgatagggatttattggtttttggtactgcgtcacttcgaagaaaccgatgacgcatacgtggcagggaatcaaattcaaattatgtctcaggtgtctggcagcgtgacgaaagtctgggccgataacaccgattttgtaaaagaaggcgacgtgctggtcactctcgacccgacagatgctcgccaggcgtttgaaaaagccaaaactgcactggcttccagcgttcgccaaacccaccagctgatgattaacagcaagcagttgcaggcgaatattgaggtgcagaaaatcgccctcgcgaaagcacaaagcgactacaaccgccgtgtgccgctgggcaatgccaacctgattggtcgcgaagagctgcaacacgcccgcgacgccgtcaccagtgcccaggcgcaactggacgtcgcgattcaacaatacaatgccaatcaggcgatgattctggggactaaactggaagatcagccagccgtgcaacaggctgccaccgaagtacgtaacgcctggctggcgctggagcgtactcgtattatcagtccgatgaccggttatgtctcccgccgcgcggtacagcctggggcgcaaattagcccaacgacgccgctgatggcggtcgttccagccaccaatatgtgggtggatgccaactttaaagagacgcagattgccaatatgcgtatcggtcagccggtcactatcaccacggatatttacggcgatgatgtgaaatacaccggtaaagtggttggtctggatatgggcacaggtagcgcgttcagtctgcttccagcgcaaaatgcgaccggtaactggatcaaagtcgttcagcgtctgcctgtgcgtatcgaactggaccagaaacagctggagcaatatccgctgcgtatcggtttgtccacgctggtgagcgtcaataccactaaccgtgacggtcaggtactggcaaataaagtacgttccactccggtagcggtaagcaccgcgcgtgaaatcagcctggcacctgtcaataaactgatcgacgatatcgtaaaagctaacgctggctaatccagaggtgcgtgtgatgcaacagcaaaaaccgctggaaggcgcgcaactggtcattatgacgattgcgctgagtctggcgacattcatgcaggtgctggactccaccattgctaacgtggcgatccccactatcgccgggaatctgggcagtagcctcagccagggaacgtgggtaatcacttctttcggggtggcgaatgccatcagcatcccgcttaccggctggctggcaaagcgcgtcggggaagtgaaactgttcctttggtccaccatcgcctttgctattgcgagctgggcgtgtggtgtctccagcagcctgaatatgctgatcttcttccgcgtgattcaggggattgtcgccgggccgttgatcccgcttagccaaagtctattgctgaataactacccgccagccaaacgcagcatcgcgctggcgttgtggagcatgacggtgattgtcgcgccaatttgcggcccgatcctcggcggttatatcagcgataattaccactggggctggatattcttcatcaacgtgccgattggcgtggcggtggtgttgatgacactgcaaactctgcgcggacgtgaaacccgcaccgaacggcggcggattgatgccgtggggctggcactgctggttattggtatcggcagcctgcagattatgctcgaccgcggtaaagagctggactggtttagtagtcaggaaattatcatccttaccgtggtggcggtggtggctatctgcttcctgattgtctgggagctgaccgacgataacccgatagtcgatctgagcttgtttaagagccgcaacttcaccatcggctgcttgtgtatcagcctcgcgtatatgctctacttcggcgctattgttctgctgccgcagttgttgcaggaggtctacggttacacggcgacctgggcaggtttggcctctgcgccggtagggattattccggtgatcctgagcccgattatcggccgcttcgcgcataaactggatatgcggcggctggtaaccttcagctttattatgtatgccgtctgcttctactggcgtgcctatacctttgaaccaggtatggattttggcgcgagcgcctggccgcagtttatccaggggtttgcggtggcctgcttctttatgccgctgaccaccattacgctgtctggtttgccaccggaacgactggcggcggcaagcagcctctctaactttacgcgaacgctggcggggtctatcggcacgagcataaccacgaccatgtggaccaaccgcgagagcatgcaccatgcgcagttgactgagagcgtaaacccgttcaacccgaatgcccaggcgatgtacagtcaactggaagggcttgggatgacgcaacagcaggcaagtggctggattgcccagcagatcaccaatcaggggctgattatttccgccaatgagatcttctggatgagtgccgggatattcctcgtcctgctggggctggtgtggtttgctaaaccgccatttggcgcaggtggcggcggaggcggtgcgcactaagtacaactaagccagttcatttgaactggcttttttcaattaattgtgaagatagtttactgattagatgtgcagttcctgcaacttctctttcggcagtgccagttcttcgttgctgttgatgcgtacgtcacgttccagaatgctacgcgcaatatcctgcgcttcctgcaagctgtgcatctggtaagtgccacactggtagacgttcagttccgggatctgattctgatcctgcactttcagcacgtcttccattgccgttttccaggcatcagcaacacgctgctcatctggcgtaccaatcagactcatataaaaaccggtgcggcagcccattgggctgatatcgataatctctacaccattaccgttaagatggttacgcataaaaccagcaaacaggtgctccagggtatggatccctctttctggcatcacttctttgttcggcacgcagaagcgcagatcgaacacggtgattgcgtcgccatgcggggtgttcattgttttcgccacccgaactgcaggcgcttccatccgggtatgatcgactgtgaagctatctaacaacggcatttagccacctccggtaatttttttaaaaattttctgaactctttcttcccaggcgagtctgagtatatgaaagacgcgcatttgttatcatcatccctgaattcagagatgaaattttggccactcacgagtggcctttttcttttctgtcaggcgtgtttttccagccacaccgcaaacggttcggtatcagcggcttccatttcctgctgacggcgttcagacgcctcgcgctcggctacaaaatcctcttcgcgcagaatttccagcggctcttcacgcagcagattacggtaggcttctgcaaatgctttgcctgttccgccaataccagtatcaatcatagaccttaagatacgggcagagaaagtcagatcgggattatcgaagcaggcaaccagttcatcacacactttctgatacgcttcgccgccgttaatactatccagcgtttgcgcgacgcgtttcagatcgcggaacagatctttacccacctgcggtaacgggaactgtgcggtttcgcagccgatacccagcgtcagacccggtttgcgaccttcgaggatcacccggttccagttaacgcgtgtacaggcaagttcgctactgctcatttccggtgcatcagccagcgcacaccagaccataaacaggtcgaggaatcgcacctgctgttcatctacaccaatcgggctgaacgggttgatgtccaggctacgcacttcaatatattcaatgccgccacgtaacagcgcatcagaagggctctcgccgctgcgggtaacgcgttttggacgaatcggcgcgtacagttcgttttcaatctgcaacacgttgctgttgatttgcagcctcttaccgtctttctcaataccaatcttcgcgtactcttcgcttggcgttttgattgcctgtttaaggcccgctacgtactcgtaaagatcgttgaaggtaataccaagattgctttggcttttattggtatagccgagatcgctcaaacgaagagaggtcgcatacggcaggtaatacataccgcactcggttttctcaaacggcaggctcgttggttttccttgcaggaaagaagaacaaatcgccggagatgcaccaaacagataaggaatgacccaaccgaaacgatagtaattgcggataacgcggaaatagcccgcagaaattttctctttggcatcagcgccgctgatatcaccgcacttcgcttgccagaatgccattggcaaagagaaattgtagtgcacgccggaaatggtttgcatcagcgcgccgtagcgatttttcagcccttcacgatacagcgttttaaagcgtccggtgttagaagtgccgtactgtgccagttcgatgtcctgaccttctgcgatgtagcatggcatacttaacggccacatccgctcatcgcccatattgcgcgccgtataacgatgcagatcgcgcataaaggtcagcatatgttcaatatcaccatccactggtgtaatgaattccagcaatgcttccgcaaaatcggtagtaatccatttgtgcgtcagtgcggaacctaatgcttcaggatgacctgttgttgccagtgtgccatcagcattaacacgcaaagtttcgcgctccagcccacgctgtatcccctttaacgcctgaggatgtttttccagccaggccagcgcctgacttacgtccgggatcaaattgacctcccgcctgtcaaaatcgttttaattagcataactgtaatggtgaccatatgtgcaggcctacaattagtgccaccacatcatgccctgaacggtcgctgctgcaactgcaacatagcgtaacgctttaccaaggcacaaaaaaaagattaccggtccccagctgatgcgcatccatcccgctaacagacacagtaaatcgccaaccacgggcatccagcttaataatagcgtgactgcaccatagcgtttcagccagccggtagctttctcttgccagcggcttgttttacgcaatggaaagaaacgcccaaggataacgttagttaaccctccaaggctattacccattgttgctgttaaaactaaaacccagggatgactgatcccggaaagcaacattgccaccagcacgacttcggagttgccgggtaatagtgtagcgctgagaaaactactggcaaacaagctgaaaaggcttaacgcttcactcacagcaagcgaacatccacggcgtccatgcctgctgcacgggccgcctgaataccgaaatcggcatcttcaaagaccacacactgcgtcggttgcacgcccatacgctgcgcgcacaacaaaaatgtgtctggcgcgggtttatggtgtttgacgtgatcggcagcgacgacggcgtcaaaataatggcgtaatcccaggtgcgccagcaatgcctcagcgatggcgctttcactccccgttcctacagccattgggcgacgaccatgccaacttttcaccacatcaacaagaggaagcggttcgacgctatccagcagcatacttcttactgcttctgttttttcacgcgctaacgcatgcgggtcgagatcggcctgattcagctcaataattgcctgagcaatacgccaggtggggcttccattaagcgcaatcatcgcctgaatatcgtactgaagaccgtagtgccctaatacttcgcgccacgctttacggtgcgtaggctccgtatccaggattgtgccatccatatcaaaaattaaacctgcataacgctcgtacatggtcttctcgcaagtcgaaaaatatgacgctactttagcgtaattgcttgattttgtcgctgatggcgaaggagaagaaaattcaggaaatggataaaggagttatttagaaatgagatatttttgaaggaaattttttggagaagatggtgcatccgggaggatgactcactgacgttcgcccttcgggccgttgctggcgcaacgttatccttcctggtgcctgcggttaataccgctatctcttcgataccttcattgctgaaggttacggagaatatggtgcatccgggaggattcgaacctccgaccgctcggttcgtagccgagtactctatccagctgagctacggatgcatcgggaaaacttattctactgctgatattgataccgctactaaagccatatcaattaagagatggtgcatccgggaggattactcgccttgcggctcgcccttcgggccgttgctaaagcaacgttatcatccctagtgcctgcggttaattccgctacctcttcgataccttcattgctgaagatttcggagaatatggtgcatccgggaggattcgaacctccgaccgctcggttcgtagccgagtactctatccagctgagctacggatgcatcgggaaatttattttactgctgatattgataccgctactaaagccatatcaagtaagagatggtgcatccgggaggattcgaacctccgaccgctcggttcgtagccgagtactctatccagctgagctacggatgcatcgggaaacttactttactgcagattttttgataccgctactaaagccgtatcaagtaagagatggtgcatccgggaggattactcgccttgcggctcgcccttcgggccgttgctaaagcaacgttatcctccctggtgcctgcggttattaccgccacctcttccataccttcatcgctgaaagtacgtagaatatggtgcatccgggaggattcgaacctccgaccgctcggttcgtagccgagtactctatccagctgagctacggatgcaaatggcggtgaggcggggattcgaaccccggatgcagcttttgaccgcatactcccttagcaggggagcgccttcagcctctcggccacctcaccacacgcctcttacgagtgcttcgaagaacttgtttatcgctcatcgtcgctgcgtggcgcacatattactttctgagacttataagtcaaacaatttttcctacacttttatcgtttgcacacttcacgttcaattagtctgtaaaaacgtcaaaaagagtgttttatcaacagaagaatggaggtctgacagatagtagtaatgcaaaaaaatggagacttaagttgaatgaacgggagtaaagcgaaaagactatagagtgaaggagaaattttgagggtgcgtctcaccgataaagatgagacgcggaaagattagtaactggactgctgggatttttcagcctggatacgctggtagatctcttcacggtgaacagaaacttccttcggggcatttacgccaatacgtacctggttgccctttacccctaaaactgtcacggtgacctcatccccaatcatgagggtctcaccaactcgacgagtcagaatcagcattctttgctccttgaaagattaaaagagtcgggtctctctgtatcccggcattatccatcatataacgccaaaaagtaagcaatgacaaacacattacatctaagcagtcatggcattacattctgttaaacctaagtttagccgatatacacaacttcaacctgactttatcgttgtcgatagcgttaatgcgaatgccgtgaagcgagtccacggcattgcctgacgcttatattattgcaatttcgcgctgacccagcctttcacactggctaacgctgcaggtaaggccgcagcatccgtaccaccggcttgcgccatgtcaggacgtccaccacccttgccgcccacctgctgagcgaccataccaatcagttcccctgctttcacacgatctgtgacgtccttagatacgcctgcaatcagagaaaccttaccttcgactaccgttgccagcacgataattgtgctccccagctgattttttaaatcgtcaaccatggtacgcaacattttcggctcaacaccgctaagctcgctaaccaacagcttaacaccattaacatcaattgccttactggaaagatttgcgctctcctgtgcggcagcttgttctttaagctgttgtaactctttttccagctgacgcgtacgttccagtacactgcgcactttatcagccagattattgctatcgcctttcagcagatgcgcgacttcgcttaagcgatcgctgtctgcatgaacggtggcgatagcaccttctccggttaccgcttcgatacgacgaacgcctgcagcagtaccgctttcagagatgatgcggaacagaccaatatcaccagtgcggctggcgtgagtaccgccacacaactcggtagagaaatcgcccatgctcagcacgcgtacgcgctcatcatacttctcgccgaacagcgccatcgcacctttcgctttcgccgcttcgagatccatgatgttggtttcgatcggcaaattgcgacgaatctgtgtgttcaccaggtcttcgaccgcacgaatctcttctggtttcatcgcttcgttgtgactgaagtcgaagcgcagcaccttgtcgttaaccagactacctttctggcttacatgagtacccagaacctggcgcagcgcagcgtgcatcaggtgcgttgcggagtgattcagacgaatacgggcgcgacgagcctcatcaacatcagcctgcaccgcgtcgcccactttcagagaacccgcagcaagtttaccgatgtgaccaatcgcctggccgtatttctgcgtatcttccaccgcaaaggagaagttagcgcctttcagttcgcctttatcgccaacctgaccgccggattccgcatagaatggcgtttgatccagcacgaccacagcttcctggcctgcattgatggcatcaaccgctttaccatcaacaaacagcgcagtcactttgccgttcagttccagatggtcatagcctttaaattcagatgcactgtcaacacggatcattgcgttgtaatcggcaccaaagccgctggcttcgcgcgcgcgacgacgctgctcttccattgcagcttcaaaaccagcttcgtcaactttgatgttgcgctcacgacaaacatcagccgtcaggtcaaccgggaagccataggtgtcgtacagacggaaagcagtttcaccatccagcgtatcaccagaaagttttgccagctcttcatccagcaacgccagaccgcgctccagagtacgagcaaactgctcttcttcagtcttcagcacctgctcaacctgcgcctgctggcgtttcaggtcttcacccgcagagcccataacgtcgatcagcggaccaaccagtttgtagaagaaggtttctttcgcgccgagcatattaccgtgacgcactgcgcgacgaatgatacgacgcagtacataaccacggttttcattggacggcattacgccatccgcgatcaggaacgcacaagaacgaatgtggtcagcgattacgcgcaggcttttattgctcagatcggttgcgccagtgactttcgctaccgcctggatcagcgtgcggaacaggtcgatgtcatagttagagttaacgtgttgcagcaccgcagcaatacgctccagacccataccggtatctacagacggcttcggcagcggttccatcgtgccatcggcctggcggttgaactgcatgaagacgatgttccagatctcaatgtagcggtcgccgtcttcttccgggcttcccggagggcccccccaaatgtggtcgccgtgatcgtagaagatttcggtgcacgggccgcacggaccagtgtcacccatctgccagaagttgtcagatgcgtatggcgcacctttgttatcgccgatgcgaataatacgttcgcgcgggatccctacttctttttcccagatttcgtaggcttcgtcgtcgctttcatagacggtaacccacagacgctctttcggcagggcaaaccatttttcgctggtcagcagttcccatgcaaactgaatggcatcgtgtttgaaatagtcgccgaagctgaagttgcccagcatttcgaagaaggtatggtgacgcgcggtgtaaccgacgttttccaggtcgttgtgtttaccacccgcacgcacgcagcgttgggaagtggtagcgcgggaataattacgcttgtcgagcccaaggaacacatccttgaactggttcatcccggcgttggtaaacaacaaagttgggtcgttatggggtaccagggagctgctggcaactacctgatgtcccttactatggaaaaagtcgagaaacgcctgacggatctcagcggtgctcttgctcataattatcctgaaatcaagctaacgaaatatcgccaccagctccagcgtgtcttaaccgccgggctggtaactgaaaagtgggaataagataagttttcttgactgggaagtaaaataccgtatgcgttcagtcggcaaaatttcgccaaatctcctggatatcttccatcagatagccacgatagagcagaaaacgctggatcttaactttttcactaaagacagttggcaaaggttcgccatattttcgcgtcgcctgatcgcgcgccagtgcgcaccagtcgatgtcacattcacgcatcgctttttctgtcgcttcgcgggaaatacctttctgattcagttcctggcgaatacgcgcaggtccataacctttgcggctacggctggcgataaagcgcgcaacaaatcggctgtcatcgagatagccatgttcatggcaccaggcaataacgcgctcgtaatcttctgccgtagcatcaatctcttctgggccatttttgcccataatcggtgccgcgagtttacgtcgcagttcttgctcactgtgatcgcgcaccgccagaatgcgtaccgcacgatccaacaggcgagcatatgccgggcgacgggatgtactttctgtcatggcatatccttacaacttaaaaaagcaaaagggccgcagatgcgacccttgtgtatcaaacaagacgattaaaaatcttcgttagtttctgctacgccttcgctatcatctacagagaaatccggcgtactgttcgggttgctcagcagcaactcacgtactttcttctcgatctctttcgcggtttccgggttatctttcagccaggcagtcgcattcgctttaccctgaccgatcttctcacctttgtagctgtaccacgcgcctgctttctcgatcagcttctcttttacgcccaggtcaaccagttcgccgtagaagttgataccttcgccgtagaggatctggaattcagcctgtttaaacggcgcagcgattttgttcttcaccactttcacgcgggtttcgctacccaccacgttttcgccctctttcaccgcgccgatacgacggatgtcgagacgaacagaggcgtagaatttcagcgcgttaccaccggtagtggtttccgggttaccgaacatcacaccaattttcatacggatctggttgatgaagatcagcagcgtgttggactgcttcaggttacccgccagcttacgcatcgcctggctcatcatacgtgccgcaaggcccatgtgagagtcgccgatttcgccttcgatttccgctttcggcgtcagtgccgccacggagtcaacgacgataacgtctactgcgccagaacgcgccagggcgtcacagatttccagtgcctgctcgccggtgtccggctgggagcacagcaggttgtcgatatcgacgcccagtttacgtgcgtagattgggtccagcgcgtgttcagcatcgataaacgcacaggttttaccttcacgctgcgctgcggcgatcacctgcagcgtcagcgtggttttaccggaagattccggtccgtagatttcgacgatacggcccatcggcagaccacctgccccaagcgcgatatccagactaaggctaccggtagagatggtttccacatccatggaacggtcttcacccaggcgcatgatggagcctttaccaaattgtttctcaatctggcccagtgctgccgccaacgctttctgtttgttttcgtcgatagccatttttactcctgtcatgccgggtaataccggatagtcaatatgttctgttgaagcaattatactgtatgctcatacagtatcaagtgttttgtagaaattgttgccacaaggtctgcaatgcatacgcagtagcctgacgacgcaccgcatcacggtcgccgctgaagcattcccgccgggtaatgccttcaccgcgggcagtggcaaaagcaaaccagacggtgccgacaggcttctcttcactgccgccatccggcccggcgataccactaatagacacggcataatcagcacgagccgctttcagtgcgcctatcgccatttccaccacgacgggttcactcaccgcgccatgctgcgccagcgtctcttcgcgtacgccgatcatctgcgctttggcttcgttactgtaggtgacaaatccgcgttcaaaccaggcggagctaccggcaatatcggtaatcactttcgctacccaaccaccggtacaagactcggcagttgttacggttgcgccacgggctttcagcgcctgcccaacctgttcacttaactgcatcagttcactgtcagtcatcacaacctctgtcagtcaaaaatttatgccggacaagatagcactttcgtcaggaagatggtgttggcgttgcaattttacgaggaggattcagaaaaaagctgattagccagagggaagctcacgcccccctcttgtaaatagttactgtactcgcgccagcgccacggcttgtcctaactgccagaccgccattgcgtaatgggtgctgtggttgtaacgggtgatggtgtagaagttcggcagaccgtaccagtactggtagccggtgccaacatccagacgcagcaggctggcttgttgatggttgcccagcggctgctgtggcgttaaacctgcggcggcaagctggctaatgctgtacttagttttgaagccatttggcaagcctggagcctgaccgtttgccattaccgcgacctgatcgcctttcacccagccgtgcgctttgaaatagttcgccacgctaccgatcgcatcaaccggatcccacaggttgatatgcccgtcgccgctgaaatctaccgcatattgtttgtaagagctcggcataaactgtccgtagcccatcgccccggcaaaggaacctttcagattgagcggatcgtcctgctcgtcgcgcgccatcaacaggaaggtttccagctcgccagagaaatactccgcgcggcgtgggtagttaaaactcagcgttgccagcgcatcgaggatgcgagttttccccatcacgcgcccccagcgggtttcaacgccgataatcccgacgataatttccggcggtactccatacacctgccacgcgcgattcaacgcatcttcatactgattccagaaaaccacaccgttctgcacgttgtccggcgtaataaattttttgcgataacggagccatgcgccgttcggaccacttggcggtttcacgcttgtggttggtgcctggttatccatcagccgcagtacgctatccagacgcttcgcctgggagagaatttcctgcaactgctgacgatcgaaaccgtgtttgttcaccattttgtcgatgaactgctgggcattcgggttattagcgaaatcgccgcccatctgcatcacattgtgctgcggctcaagcaggaagccgccagacggcgttccggtggtcgtatcagtctcagtaggttttggcttgctgctacaggcggcaagcaacacaaaaaggggaagcaatgttacataacgacgcttgaacatgaggggtccatttaacagattcaaccaggggcaagtatggtaaagcatcacgccccgcacaaggaagcggtagtcactgcccgatacggactttacataactcaactcattcccctcgctatccttttattcaaactttcaaattaaaatatttatctttcattttgcgatcaaaataacacttttaaatctttcaatctgattagattaggttgccgtttggtaataaaacaataaatcctgaaggagagaacaatgatagaaaccattactcatggtgcagagtggtttatcgggctgttccaaaagggcggagaggtgtttaccgggatggtgaccggcattcttccgctgttgattagcctgctggttatcatgaacgcactgattaattttatcggtcagcatcgtattgaacgttttgctcaacgttgcgccggtaaccctgtttcccgttacctactgttaccgtgcattggcacgtttgtcttttgcaatccgatgaccctaagcctgggtcgctttatgccggaaaagtacaaacccagctactacgcggcggcctcttatagctgccacagtatgaatggcctcttcccccatatcaaccctggcgaactgtttgtttatcttggcattgccagcggtctgacaacgctgaacctgccacttggcccactggcggtgagttatctgctggttggtctggtcaccaatttcttccgcggctgggtgaccgatctgaccaccgccatttttgagaaaaagatgggcattcaacttgaacaaaaagttcacctggcaggagcaacaagttgaaataacacctggcaggagcaacatcatgacgcatattcggatcgaaaaaggaacgggtggctggggcggcccgcttgagctgaaagccacgccgggaaaaaaaatcgtctatatcaccgccggtacccggcctgcgattgttgacaaactggcacagcttactggctggcaggctattgacggatttaaagaaggtgaacccgcggaggcggaaattggtgtcgcggtaatcgactgtggcggcacattacgctgcggcatctatccgaaacgacgtattcccaccattaatatccacagcacgggcaagtccggtccgctggcgcagtacattgtggaagatatttatgtctctggcgtaaaagaagaaaacatcactgtagtaggtgatgcgacaccacaaccctcttccgtgggccgtgactatgacaccagtaagaaaatcaccgaacaaagcgatggtttactggcgaaggtgggaatgggcatggggtccaccgttgcggtgctgtttcaatctggtcgtgacaccatcgacactgtattaaaaaccattctgccgtttatggcattcgtcagcgcgctcattggcatcattatggcttctggccttggtgactggattgcccacggtcttgctccgctggcgagccatccactgggtctggtcatgctggcgctcatctgttccttcccactgcttagtcctttcctcggcccaggcgcagttatcgcacaggttatcggcgtattgattggcgtgcagattggtctcggcaatattccgccgcatctggctttaccggcactgtttgccatcaacgcgcaggcggcctgcgacttcatcccggtcggtttgagcctggcggaagcccgtcaggacacggttcgcgtcggtgtcccttctgtactggtgagccgctttttaaccggcgcgccgactgtactgatcgcctggtttgtctccggttttatctatcaataaaggctgaaacatgaccgttatttatcagaccaccatcacccgtatcggcgcgagtgccattgacgccctcagtgaccagatgctcatcacctttcgtgaaggcgcgcctgcggacctcgaagagtattgcttcattcattgccacggcgagttgaaaggtgcactccatcccggtttgcaatttagtctcgggcagcatcgctatccggtgaccgctgttggcagcgtggcggaagacaaccttcgcgaactgggtcatgtcaccctgcgcttcgatggtttaaacgaagcggaatttccgggcactgtccatgtggcaggccctgtccccgacgatatcgcgccgggaagcgttttgaagtttgaatctgttaaggagtaaaaaatgaatcaggttgccgttgtcatcggtggtgggcaaaccttaggcgcgttcctgtgccacggtctggctgccgaggggtatcgcgtcgcggttgtcgatattcagagcgacaaagccgcaaatgtggcacaagaaattaacgccgaatatggtgaaagtatggcgtacggttttggtgctgacgccactagcgagcaaagcgttctggcgctctctcgtggggtagatgaaatctttggtcgcgtggatttgctggtctacagcgccggaatagcaaaagcagcctttatcagcgacttccagctcggcgattttgaccgtagcctacaggtgaatctggtgggttatttcctgtgtgcgcgtgaatttagccgtttgatgatccgcgacgggattcaggggcgcattattcagatcaacagcaaatccggcaaagtgggcagcaaacacaactctggctacagcgcagcgaaatttggtggcgtcgggctgactcaaagtctggcgctggatctggcggagtacggcattacggtgcatagtctgatgctcggtaacctgctgaaaagcccgatgttccagagtctgttgccacaatacgcgaccaagctgggtatcaaaccggatcaagtcgagcagtattacatcgacaaagtaccgctcaaacgcggctgcgattatcaagatgtgctgaatatgctgctgttctacgccagtcctaaggcgagctactgcaccggacagagcatcaatgtcaccggcggtcaggtgatgttctgatcaacagcggagatccattaaggatctccgtgagactatagaatgcctgatgcgctacgctcatcaggcatacaggacttccgccactacattaaggaaaagttatggtatccgcactcatcaccgtcgccgttatcgcctggtgtgcgcaactggccttaggcggctggcaaatttctcgttttaaccgtgccttcgacacactatgccagcaagggcgggttggcgtgggccgttccagcgggcgctttaaaccgcgggtcgtggtcgccatcgcgctggacgatcagcagcgcatcgtcgacaccttgtttatgaaaggactgaccgtcttcgcccgaccgcaaaaaattcccgcaattaccggtatgcatgcgggtgatttacagcccgatgtgatctttccccatgatccactaagtcagaatgctctaagtttggcgcttaaactgaaacgtggataatttcgttgtgaatgttacttgcttgcgaagttatcattttgaaacctaaatcaggtaatcacgcccatgaaacctcgtcagcgtcaggccgccattctggagtatctgcaaaagcagggtaaatgcagcgttgaagaattggcgcaatactttgacaccacaggcacaaccattcgcaaagatctggtcattctggaacatgccggaaccgtcattcgtacttatggcggagtggtgttgaataaagaggaatccgatccgcctatcgatcataaaacactcatcaacacccacaagaaagagctgattgcagaagctgccgttagttttatccatgatggcgatagcatcattcttgatgctggcagtaccgttttgcagatggttcccctgctcagccgctttaataacatcacggtgatgaccaacagcctgcatatcgtcaatgcgctatccgaactggataacgaacaaactatcctgatgccaggcggaacgtttcgcaaaaaaagcgccagttttcacgggcaactggcagagaatgccttcgagcatttcaccttcgataaattgtttatgggcaccgacggcatcgatctcaatgcgggcgtaaccacctttaacgaggtttataccgtcagtaaggcaatgtgcaatgccgcgcgcgaagtgattttgatggcggacagtagtaagtttggccgtaaaagccccaacgtagtttgcagtcttgaaagcgtcgataagctgattaccgacgcaggtatcgatccggcgtttcgtcaggcgctggaagagaaagggatcgatgtgatcataaccggagagagcaatgagtgaagcactactgaacgcgggacgtcagacgttaatgctggagttgcaggaagcaagccgtttaccggaacgtctgggcgatgattttgttcgcgccgccaatatcatcctgcactgtgaaggcaaagtggtggttagcggaattggcaaaagcggccacattggtaagaaaatcgccgcaacgcttgccagtaccggcactccggctttttttgtccatccggcagaagcgctgcacggcgatctggggatgatcgaaagccgcgatgtgatgctgtttatctcttactccggtggcgcgaaggaactggatctgattattccgcgtctggaagataaatctatcgcgctgctggcgatgaccggcaaaccgacgagtccgctgggcctggcggcaaaagcggtgctggatatctccgtagaacgcgaagcctgcccgatgcaccttgcgccgacctccagcaccgtcaataccctgatgatgggtgacgcgctggcgatggcggtcatgcaggcgcgcggatttaatgaagaagattttgcccgctcccacccagccggggcactgggcgctcgcttgctgaataaagtgcatcatctgatgcgccgtgacgatgccatcccacaggtggcgttaaccgccagcgtgatggatgcgatgctggaactcagccgcaccggtctggggctggtggcggtatgtgacgctcaacaacaggtacaaggcgtctttaccgacggcgatttacgtcgctggctggttggcggcggcgcactcaccacgccagtcaatgaagcgatgacggtcggcggcaccacgttgcaaagccaaagtcgcgccatcgacgccaaagagatcctgatgaagcgcaaaatcactgccgcaccggtggtggatgaaaacggcaaactcaccggcgcaataaacctgcaggatttctatcaggccgggattatttaatccttcaatcccagacgtttcgccagccgatgcaggttggcgacgtcggtttccagcatccgcgcgcaggcagcccagttgtgatgattttgtgccagtgcctgacgaatagtttcacgctggaacgcttctgtcgcttcacgcaggttttgcttaacaacgggcaccgccgccacttctggcgtcggcaacgtcacctcaggaaaagcaaaatgttgcgcctcaagaatcacttcatcgccgctgcgggtggctctcgccagaactaccgcccgatgaatagcatgttccagttcgcgcacgtttcccggaaaactgtagtgttgcagtaaatttcgcgctccggcacttaataccacgcgggagagcccctgccgcaaacgacactgctcgcagaaataccccgccagcagaatgacatcatcgccccgctcacgcagcggcggcacgctaagtggaaacacgctcaggcgatgaaacaaatcggcgcggaatcgccctgccagcacctcttcgcgtaaatcgcggttagtcgccgccagcacgcgcacatcgacccgcaaacaacggtcatcgccaacgcgctgaatatcgccatactgcaacaccctcagcagcttggcctgcaatgccaagctcaactcgccgatctcatccagaaacagcgtgccgttatccgccatttcaaacttcccgctgcgattactgatagcgccagtaaacgctcctttcacatgcccgaacaactcactttccgccacactttccggcagtgcagcacagttgagatagaccagcggattcaccgcccgtgggctggcttcatgaatcgctttcgccaccagctccttaccggttccagtctcaccgctgatcaggacgttgagatcggacgccgccacaatctcaatctcttttttcagttgcgtcatgccaggggacaagccaatcatctgcgtctgtttcaccgcttcaaacggcgtggcatcgcctggcagcatattctggctttccagttgttcaatcagcaacgcattgcttaacgctcccgccgccagcgcagcaatcagccgtagctcttcgtcgctgaaaacatcgaactgatcgggctgcatcccgtcgagcgtcagtgcgccgatcaggttttgcccggcaaacaatggcagaccaacgcaggcgtgaaccttcagactctcctgcccaggaatcaaaccgtcatagggatcgggcaattcgctgtctgcgggaaagcgcaccacatccccggcgcgggcaatcgcttccagccgtggatgcccttccagcgcaaagcgtctaccgagtacatcctttgccagaccgtcgatggcaagcggaataaactgccggctatcgtaacgtagcaacgcagacgcatcgcactccagcacctgacgtagcgtggtgatcaggcgctgaaaacgatcctggtgaccaatcccacgctgcaattcgatggcgatattcgccagcacatcaacggaaaaactcatctttgcctcactgtcaatttgactatagatattgtcatatcgaccatttgattgatagtcattttgactactcattaatgggcataattttatttatagagtaaaaacaatcagataaaaaactggcacgcaatctgcaattagcaagacatctttttagaacacgctgaataaattgaggttgctatgtctattgtggtgaaaaataacattcattgggttggtcaacgtgactgggaagtgcgtgattttcacggcacggaatataaaacgctgcgcggcagcagctacaatagctacctcatccgcgaagaaaaaaacgtgctgatcgacaccgtcgaccataaattcagccgcgaatttgtgcagaacctgcgtaatgaaatcgatctggcggatatcgattacatcgtgattaaccatgcagaagaggaccacgctggggcgctgaccgaactgatggcacaaattcccgatacgccgatctactgtacagccaacgctatcgacagcataaatggtcatcaccatcatccggagtggaattttaatgtggtgaaaactggcgacacgctggatatcggcaacggcaaacagctcatttttgtcgaaacaccaatgctgcactggccggacagcatgatgacttacctgacaggcgacgcggtgctgttcagtaacgatgctttcggtcaacactactgcgacgagcatctgttcaacgatgaagtggatcagacggagcttttcgagcagtgccagcgttactacgccaatatcctgacgccgttcagccgcctggtaacaccgaaaattaccgagatcctgggctttaacttaccagtcgatatgatagccacttcccacggcgtggtatggcgcgataacccgacgcaaattgtcgagctgtacctgaaatgggcggctgattatcaggaagacagaatcaccattttctacgacaccatgagcaataacacccgcatgatggctgacgctatcgcccaggggattgcggaaaccgacccacgcgtggcggtgaaaattttcaacgtcgcccgaagcgataaaaacgaaatcctgactaatgtcttccgcagtaaaggcgtgctggtcggcactagcacgatgaataacgtgatgatgccgaaaatcgccgggctggtggaggagatgactggtttacgcttccgtaacaaacgcgccagtgctttcggctctcacggctggagcggcggtgcggtggatcgtctttccacgcgcctgcaggatgcgggtttcgaaatgagccttagcctgaaagcgaaatggcgaccagaccaggacgctctgaagttatgccgtgaacacggtcgcgaaatcgcccgtcagtgggcgctcgcgccgctgccgcagagcacggtgaatacggtagttaaagaagaaacctctgccaccacgacggctgacctcggcccacggatgcagtgcagcgtctgccagtggatttacgatccggcaaaaggcgagccaatgcaggacgttgcgccaggaacgccgtggagtgaagtcccggataacttcctctgcccggaatgctccctcggcaaagacgtctttgaagaactggcaagcgaggcaaaatgagtaacggcattgtgatcatcggtagcggcttcgccgcccgccaactggtgaaaaatattcgcaaacaggacgccactattccattaaccctgattgccgccgacagcatggatgagtacaacaaacctgacctcagccatgttatcagtcaggggcaacgtgccgatgaccttacccgccagacggcgggtgaatttgccgagcagtttaatctgcacctgtttccacaaacctgggtgacggatatcgatgccgaagcccgtgtggtgaaaagccagaataatcagtggcaatacgacaagctagtactggcaaccggtgccagtgcctttgtcccgcctgtgcctgggcgtgagttaatgctgacgttaaatagtcagcaagagtatcgcgcctgtgaaacgcaactgcgggatgcccgacgcgtgttgattgttggcggtggtttgattggtagcgaactggcgatggatttttgtcgtgcaggcaaagcggtcacgctaatcgacaacgctgccagtattctggcgagcttaatgccaccggaagtaagcagccgcttgcagcatcggttgacggagatgggcgttcatctgctgttgaaatctcagttacaggggctggaaaaaacggattctggcattcaggcaacgctggaccgccagcgcaatatcgaagtggatgcggtaattgccgccaccggactgcgcccggaaaccgccctggcacgacgcgccgggctgacgattaatcgcggcgtttgcgtcgatagttatctgcaaaccagtaataccgatatttacgcgctgggcgattgcgcggaaattaacggtcaggtattgccgttcctccagccgattcaacttagcgcgatggtgctggcaaaaaatcttctcggcaataacacgccgctgaaactcccggcgatgctggtgaaaatcaaaacgccggaattaccgctgcatctggcaggcgaaacccagcgtcaggatttacgctggcaaattaataccgaacgccagggaatggtggcgcgcggcgttgacgatgctgaccagcttcgcgcctttgtggtcagtgaggatcggatgaaagaggcatttggattgttgaaaacattgccgatgtaagtgggctactgtgcctaaaatgtcggatgcgacgctggcgcgtcttatccgacctacggggacgcatgtgtaggccggataaggcgtttacgccgcatccggcaatggtgtccaaatgcaacacgttttatccgttctggacttcacccgctaaccaacgcgccgcagcaataaccccctgccccagagacaaaccgccatcacccgccggtaaactctgtggaaagagcaatgtgaaatcagcgagataatgcgccagacgtgcacgcagcaaacggttatgaataaccccgccgctaaataccagcgtagtgataccacgcatcgtggcctgctcacgcatcaacgcggcaaaaccctgcgccagcgcatcatgaaacgcccacgcgcgttgattaaccggtgcctgccagttcagccactgctgccagaaagtggcgagatccagttgattgtccacccgcggcattgtcaccggatgcgtcactccgtggcaactggctgcgagcgcctccagagcacaagccgcttcaccttcataacttaacgtggctggcgcacagcccagtgccgccgccactgcatcgaaaaaacgcccacagctactcgccagcggcgcgttaattccacgctcaatggcccgcgccagcacgctccagttttgctgttgcacacttgctgtttcagagtaattctgccactccggcacaaagcgcaggcactgcgccagcaggtttcgccacggctgcttcgctgccaaatcgccacccggaagcgccactgcaggcaagccgcccaggtgctcacattcgcgatagttcacccgcaggcactcgccgccccacaaagcgccgttctcccccataccgataccgtcgagcgtcaaagcaatgacatcaccgccatccagcggccactgatgctctgccagacacgccgctgcatgggcatgatgatgcagtaccgtttgcgtcggcagattcatttcacgcgcccactggctggagacatagcccggatgcgcgtcatgcacaacgtattgcggggtaaaatcgtagatgttttgcatcaggcgtaacgcttcgcgccactgcatctggatgccatcgtcacttaaatcgcccagatgctgactcaacaccgcttgttcaccgcgcaccaggcagaaggtatttttcagatccgcgccgagacacagcacaggcggaacatttttaaagcccggaggcaaagccagcgcatccggcacatacccccggctacggcgcagcatttcgccgctttcgcgcaccacgctatcatccatccgctgcacgatgtcgcggttatgtatcaagaatccgtcggcaatgccctgcaaatccgccagcgcctgttcgttgctgatagctggtggtttaccgctcaggttgccggaggtcatcaccagcgggcattgcagttcctgtaacagcaaatgctggagcgggttcgcaggcaacattaccccgacttcgttaaggtcaggggcgatatcatcacaaagctcaggaacgtattttttatccaccagcacaatcggcgcggcgggcgtggtaagcaactggcgcgcagcgtctggtaaaccgtcagccactggcaacatgaccgccagcggtttcgccgggcgatgtttgcgcgcccgaagtgtcgccaccgcgttactgttacgtgcatcgcaggcaagatgaaatccgccaatccctttgatggcgacaattttgcccatttttaactgtgcgatagctgcctgtaatgccgcctcttgttccgcatgttcaccatgacttacccattcaagatgcgggccacactccgggcaggccaccggctgggcgtggaagcgacgatcgagcgggtcacggtactctttgtcacaggccggacatagcggaaacgccgccatcacggtaaacgggcggtcgtaaggcatggcgcgaataatggtgaaacgcgggccgcagtgggtacagttgataaacggataacgataacgccgttcgcctggggtattcatttcggcaaggcaagcagggcaagtagcggcatcgggaacaatttgcgtattcatggtgccgcctgtgctctggcgtatagtgaactcggtgggcagttgactccagataaacggctcacgctcgacgctatcaatacgcgccagcggcgggcagtgctgatacaattgaacaagaaacgtttccgggtcttcccgcagccggacttctacgccatcgccgtcattacagacatcgccgtgaagatttaattgctgtgccagctgccagacaaacggacgaaaaccgacgccctgcactttgccacgaatacgcagttggacaccgcaagatgtgttttttgccattgagttattcccgccatcatgaattgcgtaacccgccctgccggacacgacagcgtcgcatccggcagtcacaggtcggcgataccgcccgctccgtattctacgaatatttccgggaattcctttgatgccagaacagttctgtaagatttttagaacatcagcgccgtacggcggcgtttttctgcgctcagttgttcaagtttattacgatcgacacaaatcagcgcatgagtcgggcaagccgccatacacgccgggccgtcttcacgatggttgcacaggtcgcatttattggcttcggctttgtcagcccgtacattcagacccgcgccgctgttgcggatcaccggacgtaccaccacttccatcgcaccatacgggcaagccacaacgcaggttttgcaaccaatgcaacgttcctgcatcacatgaacaaaccctttatcacggctgatagcaccattcgggcagacgttagcgcacggtgcatcttcacactgacggcaaactgtcgccgtggaaatgttcacacctttaatgacatggatacgcggtaaaaaagtttccggggtcaggcttgcacagtcctgattttcctgatgagaaaccacgcacgctacttcacaggtacggcaaccaatacatttactcgcgtcagcaatgatgaaacggttcatcaaattctccagcaatgacagttaatgcgccgatacattcacaaatcatgccagtttttaatttactgttatttaaggaaattaatttctgtaatgcaggaaaaacgatgtcatcgacactagtgacgatgacatgtgatgacaatgtttatcggctaggagcaatgagactgtcgcggcggatcagttttccgctgaaggttttcggcggactgaaatccccgccatcgagcataaaaatcagccgtccaataatttcctgaatcatctcagtcaccggaatttttacgctggagagcgccggaacggtgtagggggcaatagcgatatcatcgaatccgataacactcacctgctctggcaccgctacgccgcgctcgtgtaacgctttcatcgcacctatcgccatatcgtcgttactggcaactaacgcgctaaatttagccccacgttcgagcaacatttctaccccttcggccccgctggcaggcgtccatttaccgttagcgataagtttttcattgagcgcaataccatgctgcgccagcgcgtctttatacccggcaagacgttcaatgctggtgggggaatccatgctgccggtaaggaaagcaatctcctgatgcccggcgtttatcaactctgccacggcgttaaaactggtctgtttatgatcgcaccagacgctatggctgctgtttttgcgcaggcggcgattaagcaccattatcggctgactgtgcgcgtcaatgatgtcatcgatctcatccacgcttaaaaaacgcgggtaaatcatgatcgcgtcgcagcgcagatccagcagatactgaatcgcctggcgctcttcttctgcgctgtgtttaccatctgccaatagcaactgccgccctttctcttccgccattcgcgcggcatgaaagagtaattcactaaaataaatgccgtggtaaagcgtgttggtcactaccagccccagcgtctgagtactcttcgcgctcagattgcgcgccagcaagtttggacggtaaccgctctcttctaccgcctgaaacacgcgatctttagtctcctggctgacgtagccattaccactaagcacgcgggaaacggtcgctttactaaccccggcgcgcttcgccacttccagcatcgtcgtcatcattttcatccctttacacgcaatcaacgcagtgtactgcaccgtttgccgattgtccttgcacaatcggcgggaaaaatattcaggtgaccggtttcacaaatataaaaaatgaacaattcactctcttgcttatttagtgacaactattcatgattttgtgaaaccggtttcttaattccgtttcagcatcggcatttttccgtcacgtcgactgataacaactacatctaccctactgataacaggataaaatccgatggccaaaaattatgcggcgctggcacgcagcgtgatagcggcactgggcggcgttgataacatcagcgcggtcacgcactgtatgacgcggttgcgctttgttatcaaagatgatgcacttatcgacagcccgacgttaaaaaccatccccggcgtgctcggcgtggtacgtagtgacaaccagtgtcaggtgattatcggcaataccgttagtcaagcctttcaggaagtcgtcagcctgctgccgggagatatgcagcccgcacagcccgtgggtaaacccaaactcacgctacgtcgcattggtgcggggatcctcgatgcgctgatcggcaccatgagtccgctgatcccggcgattatcggcggaagcatggtcaaactgctggcaatgatcctcgagatgagcggcgtgctgacaaaaggaagcccgaccttaaccattctgaatgtgattggtgacggtgctttcttcttcctgccgctgatggtcgcggcatctgccgccatcaaatttaaaaccaatatgagcctggcgattgccatcgcgggtgtgctggtacatccgagttttattgaactgatggcgaaagcggcccagggtgaacatgtcgaatttgccctgattccggtcaccgcggtgaaatacacctacacggtgatcccggcgctggtgatgacctggtgcctgagttatatcgaacgctgggtggacagcattacaccggcggtgaccaaaaacttcctcaaaccaatgctgattgtgttgattgccgcaccgctggcaatcctgctgattggcccgattggtatctggatcggtagcgccattagcgcgctggtttacaccattcatggttatctgggctggcttagtgtcgccattatgggcgcgctgtggcctctgctggtaatgaccgggatgcaccgcgtctttacgccaaccatcattcagaccattgccgaaaccggcaaagaagggatggtcatgccgagtgagatcggcgctaacctgagcctgggcggtagtagtctggcagtggcgtggaaaacgaaaaacccggaactgcgtcagacggcgctggctgcggcggcaagtgccattatggcggggatttccgaaccggcgttatatggcgtggcgatccgcctgaaacgtccgcttatcgccagtcttatcagcggttttatttgcggcgcggttgccggtatggcggggcttgccagccacagtatggcagcgccggggctatttaccagcgtgcagttcttcgatccggcgaatccaatgagcatcgtctgggtgttcgcggtcatggcgctggcggtggtgctgagctttatcctcacactgttgctcggctttgaggatattcctgttgaggaagcggctgcccaggcgcgaaagtatcagagcgtacaaccgaccgtcgccaaagaagtaagtcttaattgaggatgaaaatgagtgtatttccagaaagttttttatggggcggcgcgcttgccgccaaccagtctgaaggtgcgttccgtgaaggtgacaaaggtctgaccactgtcgatatgatcccacacggcgagcatcgaatggcggtgaaactggggctggaaaaacgttttcagttgcgagatgacgagttttatcccagccatgaggcgacggatttttatcatcgttataaagaagatatcgccctgatggcagagatgggattcaaggttttccgtaccagtattgcctggagccgtctctttccgcagggcgatgaaatcacgcccaatcagcagggcattgctttttatcgttctgtctttgaagagtgtaaaaagtacggtatcgaaccgctggtcacgttgtgccacttcgatgtgccgatgcatctggtcaccgaatatggctcctggcgtaaccgcaagctggtggagtttttcagccgctacgccagaacctgctttgaagcatttgatggtctggtgaaatactggctaaccttcaatgaaatcaacattatgttgcatagcccgttctccggcgcgggtctggtgtttgaagaaggtgaaaatcaggatcaggtgaaatatcaggccgcgcatcaccagctggttgccagtgcgctagccaccaaaatcgcccatgaggttaacccgcaaaatcaggtgggctgtatgctggcgggcggtaacttctacccttacagttgcaagccggaagatgtctgggcggcgctggagaaagaccgggaaaacctgttttttatcgatgtgcaggcgcggggcacgtatccggcttactctgcccgcgtattccgcgaaaaaggggtaaccatcaacaaagcaccgggcgatgatgaaatcctgaaaaacaccgtcgattttgtctctttcagctattacgccagccgctgcgccagcgcggagatgaacgccaacaacagcagtgcggcgaacgtggtgaaaagcctgcgtaatccgtatctacaggtgagcgactggggctggggaattgatccactcggtctgcgtatcaccatgaatatgatgtacgatcgttatcagaagccgctgtttctggtggaaaacggcctgggcgcaaaagatgaatttgctgccaatggcgagattaacgacgactatcgcatcagctacttacgcgaacatatccgcgcaatgggcgaagcgattgcagacggcattccgctgatgggctacaccacatggggctgtattgatttagtttccgcctctacgggtgaaatgagcaaacgctacggctttgtctttgttgaccgtgacgacgcaggcaacggtacgctgacgcgcacgcgtaagaaaagtttctggtggtataaaaaagtgattgccagtaatggggaagatttagagtaagtaacagtgccggatgcggcgtgaacgccttatccggcctacatgtcgcacgaaccatgaaggcccgataagcgcagcgcatcgggcaatttagcatttggcatcagagctggttcaccccatcaagaacatccctgtcctgattccttaatgaaaaattactcttcttccaccgctaactgcgcgaagccgccatttccttcccagccttccagtcgttgataaacggtttctaccgcatctttaatcggctgggtcatcgggtagtaaaagccgacgatatccggctgaatgccgaggaaaatcacttcgccaatatcttctttcaactggtcgataaggtaattcaacggcatgttatgggtagtcatcataaacatctcggcgatatcatccgggtcgatgatgcggatctcgccggggtttagccccatatccgtggcgtcgacaatcagcagtcgtgtcgggcgcagttcacggatagcgacgatgtcgttttccggtgcgctaccgccgtcaatcaccacccagttacctttcggcgcggcggcgcacttttccgccagcagcggacctgcgccatcatcgcccatcatgctattgccaacacagagtaaaacgtcagtcacgcagtctcctcaccatcaaatagatggcgttttcctgatgaatatcatgcagcatacttaacagcattgtactccattcctgctgctggctagtttgcgctgcccgggctttatcgaatgcgttggccagcatcggcacatggttaatgtcgatgacgatctcaccatatttcggcacgccttccattttgcggcgggcttcactgcctgcctccagagtggcaatccatgccagatattcatcccacgggcaggtgagcgccgcttccaggcaatcgataaccccaaggtggtgaccaatcgccaggctgtaatagaccacctgctgcgcctcggcgggcgtggcatcgttctcatcaataaatttatggctcagttgactgaacaccaccttttcactcatcggatacgcgcctcttcaacaacatgattcagatggctgacaatctcgttcagacgcggatcgttttccgcttccagccagcgtgcaacctgttcttcgccctgccctaactgtgtaaggtaatcatcggcaatctgacgaccgtaacgataacccgccaggcgacgtgcttcgcgatccactttcacgcgcagcggctgcaccatatcaccatgcaggatctccgccggttgttcatccagttcacccggcccacgggcgtgaattttctgctccagcaggccgagcgccattgcaaagccgtacagcgtggcggcaggcgttggcgggcagccagggatataaacatccacagggacaattttatccgtaccgccccacacgcagtagagatcgtggaagatcccgccactgttaccgcaggcaccgtaggagatacaaattttcgggtccggcgcggactgccacgcacgcagcgcaggggatcgcattgcacgggtgaccgcgccggtaaacagtaaaatatccgcatgacgcggactaggaacgactttaatgccgaagcgttctgcatcaaacagcgggctaagcgtggcgaaaatttcgatttcgcaaccgttgcagccgccgcagtccacgcggtaaacataggcagaacgtttgatttttttcagtaagctcgccttcatgctggcgatggattcatccaccgtcatggggaccggaatgccgttggcgtcacgggggcctaataaattgctcatcagatggcctctttcatatggcgagtcagttcaatacggtcggacggcaccaggcatttctggcgcttacattccgggcaagtctcaaagctttcgcggtggttttccgcgcggctgtcgccgttgtgcttaagcagcgcaatggcgtagtcgatctctttctggacggcgaaaggacgattgcagacgcggcagttgcacagcgcgaagcgggactgttgcaggaagtcttctttcttccacaccgccagttcgtactcttggctcagtttgatcgccgccgtcgggcagacttcttcgcagcgtccacagaagatgcagtgcccaagattaaactcccaggcaagctctcctgtggcgaggtcagtttcaaccgttaaggcgttactcgggcaggcattgacgcaggccgcgcagccgatgcactgctgcgggttctgctctggcttaccacggaagtttttatcaaccgcaatcggctccagcggataagagctggtcgccgtgccggttttgatgacttttttgataaaggtaaacatggcgattccttatttcagcgggctgtttttacgctcaatgctgtaacgctcgagttctttgtacggcaccactttgctcttcttcttacgcacatcgaccacggtcatgcggtcggtacaggagtagcaagggtcgaggctaccgataatcagcggcgcatcggaaacggtgttgccgcgcagcatgtagcgcagggtcggccagttcgcgtaggtcgcggcacggcagcgccagcggtacagcttctggttgtcgccggtcatgctccagtggatatcatcgccgcgcggcgcttcggcaaagcccagcgcaaagcggtgcggaatgtaggtaaagccttccaccatcagtgggccacccggcaggttatccagaccgtagtcgatcatgttcagcgcggtatagacttcgttgatacgcactttcagacgggaaataacgtcgcagccctgctcgctgtggacttccattggcagcaggccatagccgacaaacgggtgatcggcgcgggtatcacgggcgtgaccgctggcacggaccatcgggccgacgttactgaagtcgcgagcgatttccgggtccagacgaccaatgccgacagtgcgctgttccatgttcggagtgctcagcagcacatccaccagctcctgcacttcacgacgcatctgttgtgccagctggcgggtctggatcatgtcgtctttcagcagatcgcgacgaatcccgccgatcaagttcaggccgtaggttttacgcgcaccggtaaggatctctgccattttcatggaggtttcacgcacgcggaagaactgcataaagccggagtcgaagccggtaaagtgacaggccaggccaaggttgagcagatggctgtgcaagcgttctacctccagcagaatggcgcggatcatctgcgcacgttctggcacctgaatacccatcgcgttttccacgctcgtggtgtaggcggtgctgtgggcaaagccgcagatcccgcacacacggtcagagaggaaggtcacttcgttataacccatacgggtttccgccagtttttccatgccgcgatggacgtagaacagacggtagtcggcgtcgataatgttttcgccatcgacgaacagacggaagtggcccggttcatcagaagtgacgtgcagcggaccaatcggcacgacgttgtttttcttgtcgcccagttcgttgatgaactcgtaggtttcagcatcggtggtcggtgccggacgctgacgataatccatgctgtctttacgcagcggataaagttcatccggccagtcatccggcagcaccagacgacgttcatccggcagaccaaccggaatcaaaccgtacatatcgcgcacttcacgctcgccccacaccgccgccggaacgcgcggcgtcacggacggatattccggtttgttggcgtcaacttcgacgcgaaccgtaatccaacacttagtgcccttctccatgctcagcacgtagtaaacggcgtaatgaccattcagtttgcgttcgtcgttaccaaacagcacgctcagccagccaccctgtttgtagtaaagaaactccaccacttccggcaggtagttcacctttacggtgacagtcagctgatctttggtctgccaggcgtggtccagcacgacgcccggaaatgcctcattcagcgcggcgagataatgttgacctaatttttcttcagacatgctcaaactctctttaatcacgccgccagcaaggagacgaacgctaaaaatgcaaagccaaacccagcccaggtaatgcgcggagtaatatcaagacgcagacgggccatgctgttttcgaacagcgcgataaccaggacgccgaccaccagttttacgatggcaatcaccagcgccagcagcagtccaccggcggtgaaggtttccatttgtccccacggaataaacaccccgacgaacatctgcaacaccaccagctgtttcaggctgataccccatttcatgacgccaaagccgctgccgctgtattcagagagcgggccttcctgcagctcctgctcggcttccgccaggtcgaacggcagtttgcccatttcgataaaggtggcgaacgcacaggcacaaagcgccagtaccagcgggatgctctggctcagcggccagtgataaacggtgtcggtgatgttgctgatgttggtggaaccggcaacctgtgcggcaacccacagaccaagcagcagcatcggttcgaccagcacgccaagcatcgcttcacggctcgcgccgatagcggtaaacgggctaccggtatccagaccagaaatggcaaagaagaaacgcgcgatggcaaagagatacagtaaggtgatcaaatcacccagttgcggcagcggagaaccgacggtcaccaccggcagcgcagtagcgatagtcagcatgacgcccaccatcacatacggcgtcaggcggaacacccagccggaggcatccgggccgacgctctgacgccccagcagtttgataatgtcgcgatactcctgcaacacgcccggcccgcgacggttatgcaagcgggcgcgcgccacgcgggttataccggagagcagcggcgcaacggcaaataacaccagcgcctgaattaacggatataaaacactcattctcaggctcctcgactaacaataatcaccaccagtaccgccagttcaaccagcgccatccggcggaacagcaacgcactcccctcgcactgccagcccggcaccagagacaccggattcagccatttgcgtagtttcagcaccggcgcaaacgcctgtttcaccggcatggcaaaaccgtgagcggtaatcaccatacttttttcgtggtcgtaaccgcacacccaggccgcaccgcgggaacggcttggcaaacgatcgcctttgcaaatcgccataatgatgaatggcagcagcgggcaggcaatcagcagcaacgtgatcatcggttgagaaacggtggtgttagcaggctccagcggcagaggtacagcagcagagagcatcggcagtagccacggcgcagcaacaccgccaattacgcagcaaatcgccagtgccactacgcttacgctcatcaggagcggcgcacaggtggcgttttcggcttctttggtgcgcggcgcgccgaggaacgtgacgccatagactttcgccatacacatcaccgccagcgcaccggtaattgccagccccacagcgagcagcggccccagcagacgggcaacaaacgcgccactattgctcagtttgaaaaaactttgatagataacccattccccggcaaaaccattcagcggcggcagcgcagccattgccatcagcccgactaacatggcgatggagataaccggcattttcttgccaataccaccgagtttttcgatatcgcgatgaccggtacggaaccagacgctccccgccccgaggaacagtacgcttttgaacaggctatggttaagcagatggtacagaccaccgaccaggccaagagcaatcagcgccggttgttcgagcgcgatacccgttacgccagcgcccagccccagcaggatgatgccgatattttccagggtgtggtaagccagcaggcgctggatgttgtgctccaccagcgcatacagaccaccgacaaacgcggtgatcatgccgagcaccagcagcgcgatcccccaccacagcggtgcattaccgcccagcagactcagggttaaaatgcccagcaggccaattttcatgactaccgtagaaaacaacgcggcagctggcgcagaggcgttcgcatgtgcctgcggcacccagccgtgcagcggaataatcccggccagcaggccaaagccaatcactccgagcagccagatatcggaaccgagcggcagctgttgcatacgcatatccagcaggcgcagatccagcgtgccgtaacgctgccacagcagccagcaagcaatcgccagcagcagagtgccaagacgccccagcgcaaaccacagtttgccctctttgctgttgctggtgaggaacaccgcgcacagggccatgatttcggccattaccacgaacatgccgaggttgctggcaatgacggcgcagacggcggcagccatcaacatattgatctgcaagccgttgcacttcacctgcgcgtggcgatgccagtcaatgttgtagaggctgacaaacagaccgcacagaccgagcgtaatcagccaaatcgcgttaagcggagagatttgcacatcgtagcttaccaggctcagcgcaccgctcacgccaaccgcgccagtcagtacagtgaagcccgcggctgccgtatacagactaccaaccgcgccgccaattccagctatccagccacttaacgctttttgaaaagaaaagagaaatgccagaacagcggcggcgacaaaccacgccacgccgctattgatcagggaaattgcgctcatttagcctctccactttgagcctgctgaaacaaggtgagatcgccaaagtccgtgttaaaggtcagctcacgcttacgtttgctgacgcgggcgatatcggtgttatccaccagatgcagggctttagtcgggcacatccgcacgcaggccggaccttgttcatcaaagctacaaaggtcacatttgacggcgatcgcgcgaatacctggcacccagtcaagcaatgtgctgacacgcgccggagcaggcggtgccggtggcgctttcggggtattggcgtttgccggaatatccagcggacggctgccggaaaattcaattgcgccaaacgggcaggcgatgccgcacagcttgcagcttacgcacaggctttcattcaactgcacggccccatcgacgcgggtgatggcgttaaccgggcagaccaccgcgcagggtgcatcttcacagtggtgacagagctgcggcgcagattctttttcattcagcatcactctcaggcgcggcatactttgcaggccgtgctggcgatgcgtctcactacaggcggcctcacaagtgtggcagccgatacagagcgtggagtcagcaattacaaaacgattcaccaggcattcctcaggtgattgtcatttttgacgaaaacatgccgatgaaatgtcattttcgacactcatcgacacgcccatccccaaacaggcgtaacgcctgcaaaacgggcaaagcctcagctcatgctgccgggctttgtccctttaccagttggcttaaattcaccggcacattgttttcaatagcggtgtataagctgtcgtaaacgccagcgattttttcgagatagtgttccagaacctgttcgcgatcgcggatgttgaccttgccatcaatcatgccgtcaatgctcagttgcgcctgcgcaatccgctgtttgtcttcgccatcttttgtttcgacgtaatactcgatggtgtggctgttaaagccatccgccagggtgacgtaaatgcgaaaatgttcaaaaaggacgaaacagagttctttgtccggcgcgcagctcatggcgtgatgcaggcgcgctttgcttaacgtgatcccctgaaccaggctattgcagtagatgtgccactggtcctgtaggcgacgatgccgctgtgcgatgtaatcggctttctcgcttatttcccaaatagtcattgtcaggttacccgtttaacagagatgccagctttaagcattttttgtgccaacttttaatttattgttattaaagagatttttaagctaaagatgaatttcgtcgccgtgtcgacgtgtcatttcgacatcatcgacattattcaccgcagggataatcaacactggcacaattattgcttgtagctggcaatagttaatgggaggcgatatgcacgaaataaccctctgccaacgggcactggaattgatcgaacagcaggccgcaaaacacggcgcaaaacgcgtaactggggtctggctcaaaattggcgcattttcttgtgtcgaaaccagctctcttgccttttgttttgatctggtttgccgcggcagcgtggcggaaggttgtaaactgcacctcgaagaacaagaggccgaatgctggtgtgaaacatgccaacagtatgtgacgctactgacccagcgcgtccgccgctgtccacagtgtcatggtgacatgctgcagattgtggcagacgacggtttacagattcggcggatagaaatagaccaggagtgagcgatgtgtacaacatgcggttgcggtgaaggcaacctgtatatcgagggtgatgaacataaccctcattccgcgtttcgtagcgcgccatttgccccggcggcacgcccgaagatgaaaatcaccggcattaaagcgcctgaatttacccccagccagactgaagaaggcgacctgcattacggtcatggcgaagcgggcactcacgcaccgggcatgagccagcgtcggatgctggaagtcgaaattgacgtgctggacaaaaataaccgtctggctgaacgcaaccgcgcgcgctttgctgcccgcaagcaactggtgctcaacctggtttccagccctggttccggtaaaaccaccctgctgacggaaaccctaatgcgcctgaaagacagcgttccgtgcgcagttattgaaggcgaccagcaaaccgtgaacgatgccgcacgcattcgcgctaccggcacaccagcgattcaggtgaacaccggtaaaggctgccatcttgacgcacagatgattgccgacgccgcaccgcgtctgccactggacgataacggtattctgtttatcgaaaacgttggcaacctcgtatgcccggccagcttcgatctcggtgaaaaacacaaagtggcggtgctttccgttaccgaaggtgaagacaaaccactgaaatatccgcatatgtttgccgccgccagcctgatgctgctcaacaaagttgacctgttgccgtatctcaactttgacgttgaaaagtgcatcgcctgcgcccgcgaagtcaatccagaaattgaaatcatccttatttccgccaccagcggcgaagggatggaccagtggctgaactggctggagacacagcgatgtgcataaggtaaaactggctggagacacagcgatgtgcataggcgttcccggccagatccgcaccattgacggcaaccaggcgaaagtcgacgtctgcggcattcagcgcgatgtcgatttaacgttagtcggcagctgcgatgaaaacggtcagccgcgcgtgggccagtgggtactggtacacgttggctttgccatgagcgtaattaatgaagccgaagcacgcgacactctcgacgccttacaaaacatgtttgacgttgagccggatgtcggcgcgctgttgtatggcgaggaaaaataatgcgttttgttgatgaatatcgcgcgccggaacaggtgatgcagttaattgagcatctgcgcgaacgtgctagtcatctctcttacaccgccgaacgccctctgcggattatggaagtgtgtggcggtcatacccacgctatctttaaattcggcctcgaccagttactgccggaaaacgttgagtttatccacggtccggggtgcccggtgtgcgtactgccgatgggtagaatcgacacctgcgtggagattgccagccatccggaagtcatcttctgtacctttggcgacgccatgcgcgtgccggggaaacagggaagcctgttgcaggcaaaagcacgcggtgccgatgtgcgcatcgtttacagcccgatggatgcgttgaaactggcgcaggagaatccaacccgcaaagtggtgttcttcggcttaggttttgaaaccactatgccgaccaccgctatcactctgcaacaggcgaaagcgcgtgatgtgcagaatttttacttcttctgccagcacattacgcttatcccgacgttgcgcagtttgctggaacagccggataacggtatcgatgcgttcctcgcgccgggtcacgtcagtatggttatcggcaccgacgcctataattttatcgccagcgattttcatcgtccgctggtggttgctggattcgaaccccttgatctactacaaggcgtggtcatgctggtgcagcagaaaatagcggcccacagcaaggtagagaatcagtatcgtcgagtggtaccggatgccggtaacctgctggcgcaacaggcgattgccgatgtgttctgtgtcaacggcgacagcgaatggcgcggcttaggcgtgattgaatcttctggcgtgcacctgacgccggattatcaacgattcgatgccgaagcacatttccgcccggcaccgcagcaggtctgcgatgacccgcgcgcgcgttgtggtgaggtattaacgggcaaatgtaagccgcatcaatgcccgctgtttggtaacacctgtaatcctcaaaccgcgtttggtgcgctgatggtttcctccgaaggagcgtgcgccgcgtggtatcagtatcgtcagcaggagagtgaagcgtgaataatatccaactcgcccacggtagcggcggccaggcgatgcagcaattaatcaacagcctgtttatggaagcctttgccaacccgtggctggcagagcaggaagatcaggcacgtcttgatctggcgcagctggtagcggaaggcgaccgtctggcgttctccaccgacagttacgttattgacccgctgttcttccctggcggtaatatcggcaagctggcgatttgcggcacagccaatgacgttgcggtcagtggcgctattccgcgctatctctcctgtggctttatcctcgaagaaggattgccgatggagacactgaaagccgtagtgaccagcatggcagaaaccgcccgcgcggcaggcattgccatcgttactggcgatactaaagtggtgcagcgcggcgcggtagataaactgtttatcaacaccgctggcatgggcgcaattccggcgaatattcactggggcgcacagacgctaaccgcaggcgatgtattgctggtgagcggtacactcggcgaccacggggcgactatccttaacctgcgtgagcagctggggctggatggcgaactggtcagcgactgcgcggtgctgacgccgcttattcagacgctgcgtgacattcccggcgtgaaagcgctgcgtgatgccacccgtggtggtgtaaacgcggtggttcatgagttcgcggcagcctgcggttgtggtattgaacttagtgaagcggcactgcctgttaaacctgccgtgcgtggcgtttgcgaattgctgggactggacgccctgaactttgccaacgaaggcaaactagtaatagctgttgaacgcaacgcggcagagcaagtgctggcagcgttacattcccatccactggggaaagacgcggcgctgattggtgaagtggtggaacgtaaaggtgttcgtcttgccggtctgtatggcgtgaaacgaaccctcgatttaccacacgccgaaccgcttccgcgtatatgctaataaaattctaaatctcctatagttagtcaatgaccttttgcaccgctttgcggtgctttcctggaagaacaaaatgagttatacaccgatgagtgatctcggacaacaagggttgttcgacatcactcggacactattgcagcagcccgatctggccagcctgtgtgaggctcttagccaactggtaaagcgttctgcgctcgccgacaacgcggctattgtgttgtggcaagcgcagactcaacgtgcgtcttattacgcgagccgtgaaaaagacacccccattaaatatgaagacgaaactgttctggcacacggtccggtacgcagcattttgagccgccctgatacgctgcattgcagttacgaagaattttgtgaaacctggccgcagctggacgcaggtgggctatacccaaaatttggtcactattgcctgatgccactggcggcggaagggcatatttttggtggctgtgaatttattcgttatgacgatcgcccctggagcgaaaaagagttcaatcgtctgcaaacatttacgcagatcgtttctgtcgtcaccgaacaaatccagagccgcgtcgttaacaatgtcgactatgagttgttatgccgggaacgcgataacttccgcatcctggtcgccatcaccaacgcggtgctttcccgcctggatatggacgaactggtcagcgaagtcgccaaagaaatccattactatttcgacattgacgatatcagtatcgtcttacgcagccaccgtaaaaacaaactcaacatctactccactcactatcttgataaacagcatcccgcccacgaacagagcgaagtcgatgaagccggaaccctcaccgaacgcgtgttcaaaagtaaagagatgctgctgatcaatctccacgagcgggacgatttagccccctatgaacgcatgttgttcgacacctggggcaaccagattcaaaccttgtgcctgttaccgctgatgtctggcgacaccatgctgggcgtgctgaaactggcgcaatgcgaagagaaagtgtttaccactaccaatctgaatttactgcgccagattgccgaacgtgtggcaatcgctgtcgataacgccctcgcctatcaggaaatccatcgtctgaaagaacggctggttgatgaaaacctcgccctgaccgagcagctcaacaatgttgatagtgaatttggcgagattattggccgcagcgaagccatgtacagcgtgcttaaacaagttgaaatggtggcgcaaagtgacagtaccgtgctgatcctcggtgaaactggcacgggtaaagagctgattgcccgtgcgatccataatctcagtgggcgtaataatcgccgcatggtcaaaatgaactgcgcggcgatgcctgccggattgctggaaagcgatctgtttggtcatgagcgtggggcttttaccggtgccagcgcccagcgtatcggtcgttttgaactggcggataaaagctccctgttcctcgacgaagtgggcgatatgccactggagttacagccgaagttgctgcgtgtattgcaggaacaggagtttgaacgtctcggcagcaacaaaatcattcagacggacgtgcgtctaatcgccgcgactaaccgcgatctgaaaaaaatggtcgccgaccgtgagttccgtagcgatctctattaccgcctgaacgtattcccgattcacctgccgccactacgcgagcgtccggaagatattccgctgctggcgaaagcctttaccttcaaaattgcccgtcgtctggggcgcaatatcgacagcattcctgccgagacgctgcgcaccttgagcaacatggagtggccgggtaacgtacgcgaactggaaaacgtcattgagcgcgcggtattgctaacacgcggtaacgtgctgcagctgagtttgccagatattgttttaccggaacctgaaacgccgcctgccgcaacggttgtcgccctggagggcgaagatgaatatcagttgattgtgcgcgtgctgaaagaaaccaacggcgtggttgccgggcctaaaggcgctgcgcaacgtctggggctgaaacgcacgaccctgctgagtcggatgaagcggctgggaattgataaaagcgcattgatttaactgcaaattgccggacagatctgcctgtccggcatattattcatgaggttttttcggacgatatttttccggcagttctggcaccggacgcttgtcatcgatgagatgacgcacggttaagatcggatgacgccacagcattctcggcccggcccaacgcataatctgtttcatctcttcacgctttgcaggctggtaacagtgcaccggacactgcttacaggctggtttctcttcgccgaacacacatttatccagccgcttttgcgcgtaaacaaacaacgcctcgtaatgctccggctccgcactcgcctgcgggcatttcgcttgataaagatcgatcatttttttaatcgtcagtttttcacgagagatacgcttgccggacatgctgcctccacctcattaagatgtatttatattacatcttaatcttaaagggcactatgactccaaagaagaagggttagccaaccgatacaattttgcgtacttgcttcataagcatcacgcaaaagctgcaaaacagcatctttcccggaaccagcatcaagaactcgccgttcgcttcttcccctgaaatgattaactccggtatcatgtgcgccttatgtgattacaacgaaaataaaaaccatcacaccccatttaatatcagggaaccggacataaccccatgagtgcaatagaaaatttcgacgcccatacgcccatgatgcagcagtatctcaggctgaaagcccagcatcccgagatcctgctgttttaccggatgggtgatttttatgaactgttttatgacgacgcaaaacgcgcgagccaactgctggatattagtctgaccaaacgcggtgctagcgcgggagagccgatcccgatggcggggattccctaccatgcggtggaaaactatctcgccaaactggtgaatcagggagagtccgttgccatctgcgaacaaattggcgatccggcgaccagcaaaggtccggttgagcgcaaagttgtgcgtatcgttacgccaggcaccatcagcgatgaagccctgttgcaggagcgtcaggacaacctgctggcggctatctggcaggacagcaaaggtttcggctacgcgacgctggatatcagttccgggcgttttcgcctgagcgaaccggctgaccgcgaaacgatggcggcagaactgcaacgcactaatcctgcggaactgctgtatgcagaagattttgctgaaatgagcttaattgaaggccgtcgcggcctgcgccgtcgcccgctgtgggagtttgaaatcgacaccgcgcgccagcagttgaatctgcaatttgggacccgcgatctggtcggttttggcgtcgagaacgcgccgcgcggactttgtgctgccggttgtctgttgcagtatgcgaaagatacccaacgtacgactctgccgcatattcgttccatcaccatggaacgtgagcaggacagcatcattatggatgccgcgacgcgtcgtaatctggaaatcacccagaacctggcgggtggtgcggaaaatacgctggcttctgtgctcgactgcaccgtcacgccgatgggcagccgtatgctgaaacgctggctgcatatgccagtgcgcgatacccgcgtgttgcttgagcgccagcaaactattggcgcattgcaggatttcaccgccgggctacagccggtactgcgtcaggtcggcgacctggaacgtattctggcacgtctggctttacgaactgctcgcccacgcgatctggcccgtatgcgccacgctttccagcaactgccggagctgcgtgcgcagttagaaactgtcgatagtgcaccggtacaggcgctacgtgagaagatgggcgagtttgccgagctgcgcgatctgctggagcgagcaatcatcgacacaccgccggtgctggtacgcgacggtggtgttatcgcaagcggctataacgaagagctggatgagtggcgcgcgctggctgacggcgcgaccgattatctggagcgtctggaagtccgcgagcgtgaacgtaccggcctggacacgctgaaagttggctttaatgcggtgcacggctactacattcaaatcagccgtgggcaaagccatctggcacccatcaactacatgcgtcgccagacgctgaaaaacgccgagcgctacatcattccagagctaaaagagtacgaagataaagttctcaccagtaaaggcaaagcactggcactggaaaaacagctttatgaagagctgttcgacctgctgttgccgcatctggaagcgttgcaacagagcgcgagcgcgctggcggaactcgacgtgctggttaacctggcggaacgggcctataccctgaactacacctgcccgaccttcattgataaaccgggcattcgcattaccgaaggtcgccatccggtagttgaacaagtactgaatgagccatttatcgccaacccgctgaatctgagcccgcagcgccgcatgttgatcatcaccggtccgaacatgggcggtaaaagtacctatatgcgccagaccgcactgattgcgctgatggcctacatcggcagctatgtaccggcacaaaaagtcgagattggacctatcgatcgcatctttacccgcgtaggcgcggcagatgacctggcgtccgggcgcagtacctttatggtggagatgactgaaaccgccaatattttacataacgccaccgaatacagtctggtgttaatggatgagatcgggcgtggaacgtccacctacgatggtctgagcctggcgtgggcgtgcgaggaaaatctggcgaataagattaaggcattgacgttatttgctacccactatttcgagctgacccagttaccggagaaaatggaaggcgtcgctaacgtgcatctcgatgcactggagcacggcgacaccattgcctttatgcacagcgtgcaggatggcgcggcgagcaaaagctacggcctggcggttgcagctctggcaggcgtgccaaaagaggttattaagcgcgcacggcaaaagctgcgtgagctggaaagcattagcccgaacgccgccgctacgcaagtggatggtacgcaaatgtctttgctgagtgtaccagaagaaactagccctgcggtcgaagctctggaaaatcttgatccggatagtctcaccccgcgtcaggcgctggagtggatttatcgcttgaagagcctggtgtaataacaattcccgatagtcttttgctatcgggaatattaacgacaactgacgaataaaataaaaacaccctgtataataggaaagcttattttacagggtaaaaccatgccatctacacgctatcaaaaaatcaatgcccatcactatcgccatatatgggtcgttggtgatattcatggtgaatatcagttattacaatcccgcttacatcaactctcttttttccccaaaatcgacttacttatttctgtcggcgataatattgatcgtggaccggagagtcttgacgtcctgcgcctgctaaaccaaccctggtttacgagcgttaaaggcaaccacgaagcgatggcgcttgaggcattcgaaactggcgatggcaatatgtggcttgccagcggtggtgactggtttttcgatttaaatgatagtgagcaacaagaggcaatagatctgttgctgaaattccatcaccttccacatattattgaaatcactaacgacaacataaaatatgccatcgcacatgcagattatccggggagtgaatatctctttggtaaagaaatagcggagagcgaattactctggcctgttgatcgtgtgcagaaaagccttaatggcgagttacaacaaataaacggcgctgattattttatatttggacatatgatgtttgataacattcagacgttcgctaaccagatttatattgataccggaagcccgaacagcgggcggctgagtttttataaaataaagtaatctcatgcttcttctgtgaagcatgagtaacccggtgttattgcaggccattattcatttttcgctaccagcaaagagagatcctgcttcaccagcgcgcgactggcactctccggcaaaccgtcgtctgtaataatctgatcaaactcgcttaatggtaacgccagccatgtcgccacctgaccatatttcgtcgcatcacagaccaaaactcgctggcggctggcactggcaatcgcccgtttcaccgtgactttatcttccgctggcgtagaaatcccccgcacactccaactgcttgcagaaataaaagcctgatcaatcatcaggctgcgcagcatggtcgcagcggcttccccgacacaggaacggttttcccgacacactgcaccgccagtgtgaataattgtgcaattactgttgtcgagcaagtagtccgcaataacgaaatcgtttgtgaccacagtcagactctccatgtgaatcagatgctgtgctatcgctaacgtggtcgttcccgcatccagatagatacaacttcccggctgaacaagacttgccgccagcttgccaatagccgctttttgcgtcattgccagcgcagtttttacctgatgagaaggttcatgcgccacgcgtcccggagactggacgcctccggacaccagcacaacggctccctgctgctccagtttttgtaaatcccgacgaatggtcatatgactcacattcattctgtccgttagttcagcaatactgacaatgcctttttcagctaccatctcaaggatgatttggcgacgctctacgggtatcaacttttgctccttcctttgtcctgcactcattctacgctatttgcctgcgaaacgtgcgcggcgcaactaacgcttagttcacataaaataacacacaatgttaatttatgtgaatcagatcaccataccgttatcttccagcgcttatattcacaatatcaaacaaaatatcacttaaattaacaaggagagcagatgaaaacgggatctgagtttcatgtcggtatcgttggcttagggagtatgggaatgggagcagcactgagttatgtccgcgcaggtctttctacctggggcgcagacctgaacagcaatgcctgcgctacgttgaaagaggcaggtgcttgcggggtttctgataacgccgcgacgtttgccgaaaaactggacgcactgctggtgctggtggtcaatgcggcccaggttaaacaggtgctgtttggtgaaacaggcgttgcacaacatctgaaacccggtacggcagtaatggtttcttccactatcgctagtgctgatgcgcaagaaattgctaccgctctggctggattcgatctggaaatgctggatgcgccagtttctggtggtgcagtaaaagccgctaacggtgaaatgactgtcatggcctccggtagcgatattgcctttgaacgactggcacccgtgctggaagccgttgccggaaaagtttatcgcataggtgcagaaccgggactaggtagcaccgtaaaaattattcaccagttgttagcgggcgtacatattgctgccggagccgaagcgatggcacttgcagcccgtgcggggatcccgctggatgtgatgtatgacgtcgtgaccaatgccgccggaaattcctggatgttcgaaaaccggatgcgtcatgtggtggatggcgattacaccccgcatagtgccgtcgatatttttgttaaggatcttggtctggttgccgatacagccaaagccctgcacttcccgctgccattggccagtacagcattgaatatgttcaccagcgccagtaacgcgggttacgggaaagaagacgatagcgcagttatcaagattttctctggcatcactctaccgggagcgaaaagttgagctaaactctaccgggagcgaaatcatgatcaagattggcgttatcgccgatgattttaccggcgcgacggatatcgccagttttctggtggaaaacggtctaccaacggtacaaattaacggtgttccaacaggtaaaatgccggaagcaatcgacgcactggtgatcagcctgaaaacgcgctcctgtccagtggttgaagccacacagcaaagcctggcggctctgagctggttgcaacagcaaggttgcaaacagatctatttcaaatactgctctactttcgacagtacggcgaaaggtaatattggcccggttaccgatgccttaatggatgctctcgacacgccgtttacggtcttctctccggccctgccggtcaacggacgtacggtttatcaggggtatttgttcgtaatgaatcaactgctggccgaatccgggatgcgccatcacccggtaaatcccatgaccgacagctatcttccccgtctggttgaagcgcaatccacagggcgctgcggcgtcgttagcgcacatgttttcgaacaaggtgtggatgccgttcgtcaagagctggctcgcttacagcaagagggctaccgctacgcggtgcttgatgcgctgaccgaacaccatctggaaattcagggagaagccttgcgcgatgccccactggtaacgggcggttctggtctggcgattggcctggcccggcagtgggcgcaagaaaacggtaaccaggctcgcaaagcagggcgtccgctcgctgggcgcggcgtagtgctctccggtagttgctctcaaatgaccaaccgccaggtagcacattaccgtcaaattgcaccagcccgtgaagttgatgtggcacgctgcctcagtattgaaactctggccgcttatgcacacgaactggcagagtgggttctgggccaggaaagtgtacttgctccactggtttttgccaccgccagcactgacgcattggcagcaattcaacagcaatacggtgcacaaaaagccagtcaggcagtagaaacactgttttctcaactagcggcgcggttagcagcggaaggcgtgacacgctttattgtcgcaggcggtgagacctccggcgtagtcacacagagcctgggaataaaagggtttcatattggcccaaccatttccccggcgtgccgtgggtaaacgcactggataagcctgtctcactcgcccttaaatctggcaacttcggtgatgacgcctttttttcacgagcccaaagagagtttttatcatgagcgatttcgcaaaagtagagcagtctttgcgagaggagatgacgcggattgccagtagtttctttcagcgcggctatgcaaccggtagcgctggcaatctgagcctgcttttacctgacgggaatttactggcgacaccgacaggtagttgcctgggcaatctcgatccgcagcggctttccaaagtcgccgcggatggcgaatggttaagtggtgacaaacccagcaaagaggtgctctttcatctggcgctgtatcgcaacaatccgcgctgtaaagcggtggtgcatttgcacagcacatggagcacggcgctttcctgcctgcaagggctggacagcagcaacgttattcgtccgttcacaccatacgtggtgatgcggatgggaaatgtcccgctggtgccttattaccgaccgggcgataaacgcatcgcacaggatctggcggaactggcagcagacaatcaggcttttttactggcaaatcatggcccagtggtttgcggtgaaagcctgcaagaagccgccaacaatatggaagagctggaggaaacggcaaagctgatttttattctcggtgaccgcccgatccgttatctgaccgcaggtgaaattgcggaattaaggagttaatgcaatgcctcgttttgcagctaatttatccatgatgttcaccgaagtgccttttattgaacgcttcgccgcagcgcgaaaagccgggttcgatgctgtggaatttctgtttccctataactactccaccctgcaaatccaaaagcaactggagcaaaaccatctgacactggcgctgttcaataccgctcccggagatattaatgcgggggaatggggattatccgcccttcccggacgtgagcacgaagcacacgcagacatcgacctggcactggaatatgcattggcgctcaattgtgaacaagtccatgtgatggcaggcgtcgtgcccgctggcgaagatgctgaacggtaccgggcagtatttatcgataatatccgctacgctgccgaccgctttgcgccacacggcaagcgaatattagttgaagcactcagccccggcgttaagcctcattatctcttctccagccagtatcaggcactggctattgttgaagaggttgcgcgagataacgtgtttattcaactagatacttttcatgcgcaaaaagtagatggcaacctgacgcatttaatccgcgactacgccgggaaatatgcgcacgtacaaattgccggactacctgatcgacatgaaccggacgatggagaaatcaactatccgtggctgttccgcctgttcgatgaggtgggatatcagggctggatcggttgtgaatataaacctcgtggcctcaccgaagaagggcttggctggtttgacgcctggcgctaattcgttaaatccctaattacaacgtacccatacatccccccatctacggatggggtaggttaactataactttcagacagggtttcccatgtccacaattacattgttatgcattgcgttagctggcgtaatcatgctgttgctgctggtcatcaaggcaaaggtacaaccattcgttgctttgctcctcgtcagcctgttagtcgcacttgcggcaggtataccggcgggcgaagtgggtaaagtgatgatcgccgggatgggcggtgtgcttggttccgtcactattattattggtctgggcgctatgctggggcgtatgatcgaacactctggtggtgcagagagtctggctaattatttcagtcgcaagttaggtgacaaacgaactatcgctgcgctgactctggcagcgttcttcctcggtattcccgtcttctttgatgtcggctttattattcttgcgccaatcatttacggttttgccaaggttgccaaaataagcccactcaaatttggcctgcctgtcgctgggatcatgctcactgttcacgtggcggtaccgccgcatccaggccctgtcgccgcagcggggttactccacgcagacatcggctggctaaccatcatcggtattgcgatttctattcccgtaggggttgttggctactttgcagcgaaaataatcaataagcgccaatatgcgatgagtgtagaagtactggaacagatgcaactggctccggccagtgaggaaggcgcgacaaaattaagcgataaaataaatccaccgggcgtcgcgctggtcaccagcctaattgttattcctatcgcgattatcatggcgggtacggtttccgcaacactgatgccgcctagccatcccctgcttggtacgctacagctgatcggcagtccaatggtagctctaatgattgcgctggtgctggcattctggttattggctttacgtcgcggctggagcttacaacacaccagcgacattatgggcagtgcgcttcctactgcggcggtagtgattttggttactggtgctggaggggtatttggcaaagtgctggtggaaagcggcgtcggcaaagcccttgccaacatgctacaaatgattgacctgcctctgttaccagccgcatttattattagtctggcgctgcgtgcaagccaggggagtgcaaccgtagcaatactgacaaccggcgggttactcagtgaagcggtgatgggattgaatccgattcagtgcgtattggtgacgctggcagcctgctttggtgggcttggtgcgagtcatattaatgacagtgggttctggattgtgaccaaatatctggggttgagcgtagcagacggtctgaaaacctggacagtgttaacgaccattctcggttttaccggattcttaattacctggtgcgtatgggcggtaatttgaccttaataaaaaggtccgatgggcatcggaccttttattgtgcacagaaaaggccagcctcgcttgagactggcctttctgacagatgcttacttactcgcggaacagcgcttcgatattcagcccctgcgtttgcaggatttcgcgcaaacggcgcaggccttcaacctgaatctggcgaacacgttcacgggtgaggccaatttcacgacctacatcttccagtgttgccgcttcgtaccccagcaaaccgaatcgacgtgccagcacttcacgctgtttggcgttcagctcgaacagccatttgacgatgctctgcttcatatcgtcatcttgcgtggtatcttccggaccgttctctttttcatcggccaggatgtccagcaacgctttttcggaatcaccacccagcggggtgtctacgctggtaatgcgctcgttaagacgaagcatacggctgacgtcatcaactggcttatccagttgctctgcgatctcttccgcacttggttcatggtccagcttatgggacaactcacgtgcggttcgcaggtaaacgttcagctcctttacgatgtgaatcggcaaacgaatagtacgggtttggttcataatcgcccgttcaatcgtctggcgaatccaccaggttgcgtatgtactgaagcggaaaccacgttccgggtcaaacttctctaccgcgcggatcagccccaggttgccctcttcgataaggtccagcaacgccagaccacgattgccataacggcgggcaatttttaccaccagacgcaagttactctcgatcatccggcggcgagaggcgacatctccacgcagtgcgcgacgcgcaaaataaacttcttcttcggccgttaacagtggactataaccaatctcaccaaggtaaagctgagtcgcgtccaacacacgctgtgtggctccctggcttaacagttcctcttcggccaaatcgttatcactgggttcctgttctactaaggccttttcgtcaaaaacctcaactccgttctcatcaaattccgcatcttcatttaaatcatgaactttcagcgtattctgactcataaggtggctcctacccgtgatcccttgacggaacattcaagcaaaagcctggttccgccgatttatcgctgcggcaaataacgcagcgggtttacggatttccccttgtaacgaatttcaaaatgcaagcgtgtactactggttccggtgctacccatggtcgctattttttgccccgccttaacttcttgttgttcccggaccagcattgtgtcgttatgggcgtaggcactcaggtaatcatcattatgtttgatgataatcagattaccgtagccgcgcagcgcgttaccagcataaacaacgcggccatctgcggtcgcgataattgcctgtcctttgctgcctgcgatatcaatccccttgttgcccccctcagaagcgccaaaggtttcgatcactttgccctcagtcggccagcgccaggtggagataggcgtactggtacttgtactgctgacagtcggctcggttgtgcttgctgttggtaccgttacaggcgctgtgaccgtggtcgcagttggcttgttgttcggcaacattttgttagcactctgttcaccgctagactcagaatacgtaattgtcggttggctcgcaacagcaacggtggaattttgtgcaggcttgatcacaactccttgctctgctgcgtcggcctgggtaatggcatttccgccagtgattggcgtaccggaagcattacccacctgcaaggtctgaccaacgttcagcgcgtatggtgcctgaatattgttgcgctgagcaaggtcacggaaatcgttgccagtaatccaggcgatatagaaaagtgtgtcgccttttttcacggtataggtactgccgctataactgcctttcggaatgttcccatactgacggttatagacgatgcgtccgttttccatctgtaccggctgctgagctactggctgcactggctggatttgcggttgttgagtagcctgaatttgtggctgctgcaccggctgaatttgcggttgctgcgctgtagacgtcgtccccattttcggcggcggcgtaatcaacataccagaattagtatttgcaggcgcattgccattaacggagctgaccggtgccggtggattactagtgtcagaacagcctgccagccataggctaaccagactcaaagccgcaatgcggcgaacggtgaattttgggcttcccgcgctcatttatcccccaggaaaaattggttaataaccagtgacataattaccgtgcaaggcaccctactgaacactggaaaagatgttcacgatacgctgacctgcggcaaaataaccaggaaaaatccaggtatttcctcacgttttaagccagctcacccttcactaaagggacaaagcgcacggcctccacggtatcgataataaattcgcctccccgacgacgcacccgtttcaaatactggtgctcctcccctacgggtaagacgagaatcccgccttcgtccagctgcgtcattagcgcagttggaatttccggcggtgccgccgtaacaatgatagcgtcaaacggcgcacgtgcctgccaaccttgccatccatcgccatgacgggtactaacattatgtaaatcaagatttttcaggcggcgacgtgcctgccactgcaagcctttaatccgttcaacgctgcaaacatgctggacaagatgcgccaggattgccgtttgatatccgctaccggtgccaatttccagcacccggctctgcggcgtcagctcgagtaattcggtcattcgcgccaccatatatggctggctaattgtctgcccctgacctatcggcaaagcgatattgtcccaggctttttgttcaaacgcttcatcaacgaatttttcacgcggcacggcggcaagtgcattcagcacctgctcatcctgaataccttgcgcacgtaattgatccagaagtgcttgtacgcgtctgcttaccattgcgtgccaactcccacgctgtttaaccagtcactaaccacatcttgcgcgctatgcgcagttaaatccacatgcagcggcgtgatggagacatagccctcatctaccgcagcaaaatcggtccccggaccagcatcacatttaccgcccggcgggccaatccagtacagcgtattgccgcgcggatcttgctgcgggatcacctgatctgccggatgtcgtgtaccgcagcgcgtcacgcgaatacctttgatttgatccaagggtaaatccggaacgttaatattaagaatacgcccggtgcgcagcggctctttacacagtgcgcgcaaaatactacaggttaccgccgcggcagtgtcgtaatgtttatgcccgtcaaggctgacggcaagcgccggaaaacctaaatgacggccttccatcgcggcggctaccgtaccggaataaataacatcatcccccagattcggcccggcgttaattccggacacaacaatgtccgggcgcggacgcatcagagcattcacgccaagatagacgcaatcggtcggggttcccatttgcacagcaatatcaccattttcaaaggtaaacgtgcgcagggaggattccagtgtcagagaattactagcgccgctgcggttacgatcgggggcgaccacctgaacgtcagcaaactcacgcaaggctttcgccagcgtttgtataccgggtgcatgtaccccgtcatcattactcagcaatatgcgcataatcacctgttgtgttgataagttccctgacaacgctggttgcaaaactacccgccggaagccagaaacggatctctacggtgacgtcatcccaccaattccagcttaattgttgcggatacagcagcatcgctctgcgcgcggcttcaactttttcgcgcaccagtaaagcttgtaattcagtttctgcggcgacagctgcttgttcgaatgccagcgcttcacgctgagttccccattcgccactgcctggcaatgcggcggttatcatcaactctttatcgttgacgcgacgctgtaattccgccagttcttcggtggttgcgacaaaccagctaccacgtccggctaattgtagcgcatcgccgtcaacaacttgattaacgtctgcttttttgaggcgctcagcaacaatctgattaaacaacgcactgcgggctgcgctcaaccaaaaactccgtttattgcgatcgcgcaccggagtattggtttgcgcccagcgctgcgccccctgcaagttgctaccgccaatcccaaaacgttgggcaccgaagtagttcggtacaccttttacgcaaatatcgatcagacgttgttcaacgtcatcgcgattgctcacttcgcgcagaaccagggtaaaggcgttacctttcagcgcgcctaaacgcagcttgcgcttgtgccgcgcatactccagcacctggcagccttccagttgaaaggcgctcagatcgggcatttccttgcccggcacgcgagcgcataaccactgttccgtaacagcatgtttgtctttttgcccagcgaagctgacttcacgggcatgaattttcaggaatttcgccagtgcatccgccacaaaacgggtattgcagccgtttttgaggattctaaccagaatatgctcaccttcaccatcaggctcaaagcccaaatcttccaccaccacaaagtcttccggattggctttcagcagcccggtgccttgcggtttaccgtggaggtaagtgagattatcaaactcaatcattttgttgccttaatgagtagcgccaccgcttcacaggcaatcccttccccacgtccggtaaatcccagtttttccgtagtagtggctttcacgttaacatcatccatatggcagccgagatcttcggcaataaacacgcgcatttgtggaatgtgcggcaacatcttcggtgcctgagcgatgatagtgacatcgacgttgccaagggtataacccttcgcctgaatacgacgccaggcttcgcgtagcagctcgcggctatcggcacctttaaatgccggatcggtatccgggaacagcttgccgatatcccccagcgccgccgcgccaagcaatgcatcggtcaacgcatggagcgccacgtcgccatcagaatgcgccagcaatcctttttcgtaaggaatgcgtacgccaccaatgataattgggccttcaccgccaaaggcatgtacgtcaaaaccgtgtccaattcgcattatgtattctcctgatggatggttcgggtgaggtaaaactcggccagtgccaaatcttccgggcgcgtgactttaatgttatccgcacggccttcgaccaactgaggatggaatccgcaatattccagcgcgctggcttcgtcggtaatagtcgcgccttcatttagagcgcgcgtcagacagtcatgtaacagctcacgagggaaaaattgcggcgtcagcgcgtgccataagccgttgcgatcaacggtatgagcaatggcatttttgcccggttcggcacgtttcatagtatcgcgcactggtgcggcgaggatcccccccgtgcggctggtttcgctcaacgccaacaatcgcgcgaggtcatcctgatgcaaacaaggacgagcggcgtcatgcaccaatacccactgcgcgtcgccagcggctttcagacctgccagcacggaatcggcacgctcatcaccgccatctacaacggtgatttgcggatgattcgccagaggaagttgtgcaaaacggctatcgccaggacttatggcaatgacgacacgtttcacccggggatgcgccagcagcgcatgcacgctgtgttcaagaatggtttgattaccgatactgagatattgcttaggacattccgtttgcattcgacggccaaatccggccgccggaaccacggcgcaaacatccaaatgagtggttgccatgttaattcccgggctgatttatcgattgttttgccccgcagactgtgcgcgcttgctcgcgtcaggcaccagacgataaaaagtttcgcccggcctggtcatgctgagttcattacgcgcacgctcttcgagcgcctcctggccgccattgagatcgtcaatttcggcaaaaagttgatcgtttcgcgctttaagtttcgcgtttgtagcttgctgtgccgccacatcatcattgacgcgggtatagtcatgtataccgttcttaccgaaccacaggctatactgtagccagaccagaatagccagcaacagcagcgttagtttacccatcctgccccctgaaaaacggcatcatcatcccatgcatccgaagacgactctacatcctctgttggggataccgcgacaacgcgggcaaatgtaccacatttgtccattgttacgtatacccagggcgtgcagaacataatctcattattagttacggtttgaattatgaacagaggagacgggaaagtacaaattagcccagtagccacataaacagtgcgccaaacataatgcctactgtcaccagggtgaaaacaatactgtagcgtagctttccgtccatcaaactatgcagcgcaatccccaccactaccgcgacgggcatcagcgccagaaagaaaggccaggtgtagataaagaagaacagcgtgttagagccataaatcaacatcggcatcgccagcgcaaataaccaggagataaaaccgaccacggcaccaggcagactccatgtggtttcttcatcctcagtaaggctgtcgttatttgttagtgtaatgttatggctattacgcatatttgatcctgttactttgacgaaccgggcatggaaacccggtggtgtctcaggatctgataatatcgttctgtctcaacagatctaataattgctgtaccaaatttgttactaattgttcaccattgagatgaatttctgcgctttcaggcgcttcgtaaacggaatctattcccgtaaagttgcgcagttcaccggcacgcgctttcttatataagcctttgggatcgcgggcttcgcaaatcgccagcggcgtatcgacaaacacttcgataaagcgcccttctcctacgcgttcgcgaaccatctggcgttcggcgcggtgtgggctgataaatgcggtcagcaccaccagtccggcttcaaccatcaaattcgccacttcaccgacgcgacggatattctctttacgatcggcatcgctaaaaccgagatcgctgcataatccgtggcgaacattgtcgccatccagcagatacgtactgacgccgagtttatgtaacgcctcctccagcgccccggcgaccgtacttttaccggacccggagaggccggtaaaccacagcactacaccacgatgaccgtggtgtagctcgcgttgttgcacagtgaccggatggctatgccagacgacgttttcgtcatgcagcgccattatttatcccccagcaaatcgcgcgcgccccagtgcggaaagtggcgacgaaccagagcattcaattccagttcgaatgcactgaattcagatggcgcagcagttgcctggctaactggctcgtgcaccataccggcacccacggtcacattgctcaggcgatcgataaaaatcagcccacccgtcaccggattttgttgataacgatctaacaccagcggctcgtcaaaagtgagatccacgaggccgatcccattcagtggcaggttttcaacttcacgctgggtaaggttattaatatcaacctgatagcgaatgccatcaacacgcgcgcgcgtcttcttaccggcaattttgatgtcgtaactctgccctggagaaagcggctgttccgccatccataccacatccacgctcgcgctctgcaccgccggtaacgcttcgtctgccgccagcagcagatcgccacggctgatgtcgatctcatccgtcagcaccagggtgatcgcttctccggcaaaggcttcttcgcgatcaccatcaaaagtcacgatccgcgcgacgttactttccacaccagagggcagcactttgacacgttgcccgacttccacgcgaccggatgccagcgttccggcgtaaccacgaaaatcgagattcgggcgattaacgtactgcaccgggaagcgcattggctgagcatccaccactcgctggatctccacggtttccagcacttcgagcagtgtcggaccgctgtaccacggcatactttcactttggcttgccacgttgtcgccttccagtgcagagagcggcacaaagcggatatccagattacccggcagctgcccggcaaaggtcaaataatcttcacgaatacgggtgaacgtctcttcactgtaatccaccagatccattttgttgatcgccacgaccagatgtttgatccccaacagtgtggagataaaactgtgacgacgggtttgatcgagcacgcctttacgggcatcgatcagtaagatcgccagttcacatgtgcttgcgccagtcgccatattgcgggtgtactgctcgtgccctggggtgtcggcgataataaatttacgcttctcggtagagaaatagcggtaggccacgtcaatggtgatgccctgttcgcgctcagcttgcaggccgtccaccagcagagccagatccagcttttcgccctgggtgccgtgacgcttactgtcgttatgcaggctactgagctgatcttcgtagatttggcgggtatcgtgcagcagacgaccaatcagagtacttttgccgtcatcgacgctaccacaggtcagaaaacgcagcaggcttttatgttgttgcgcaatcatccaggcttcgacgccgccttcattggcgatttgttgtgcaagtgcggtgttcatcttaaaaatacccctgacgttttttcagctccatagaccccgcctggtcgcggtcaatcacgcggccctgacgttcactggtggtggaaaccagcatctcttcgatgatttccggcagtgtttgtgcattactctccaccgcaccggtcagcggccagcagcccagcgtacggaaacgcaccatccgttttttaatcacttcgcccggttgcaggtcgatacggttgtcatcaatcatcatcaacataccgtcgcgttccagaaccggacgttccgcagcgagatatagcggaacaatgtcgatattttccagccagatgtattgccagatatcctgctcggtccagttagagagcgggaagacgcggatgctttcgcctttgttaatttgcccgttgtagttgtgccacagctccgggcgctgatttttcggatcccagcgatggaagcggtcacggaaagagtaaattcgctctttagcgcgggatttctcttcgtcacggcgcgcaccaccgaaggcggcatcaaaaccgtatttgttcagcgcctgtttcaggccttcagttttcataatatcggtatgtttcgcgctgccgtgcacgaatggattaatccccatcgccacgccttccgggtttttatgcaccagcagttcgcagccgtaggctttagcagtacgatcgcggaactcatacatctcgcggaatttccagccggtatcgacatgcagcaacgggaaaggcagcgtacctggataaaacgccttgcgcgccagatgcagcatgacgctggaatctttaccgatagagtagagcatcaccggattactgaattctgccgccacctcgcgaataatgtggatgctttccgcctccagttgccgcaggtgagtaagtcgtatttgatccataaccgttcctttgcaataccgctattttcttgccatcagatgtttcgactatagggagcgtaagagaacgaatgaaattaccaattagaatgagtagttccttaacggaataacgatttggcaaagctaatatcaaaaagtgcttaaggcaccggatttcgggcgtttaggaagatttgaaattgttttagcgcagcggcagtttcatactatggcggtaaaaaaatttgcatggtatttaaggactcactatgttttccgcattgcgccaccgtaccgctgccctggcgctcggcgtatgctttattctccccgtacacgccagcagtcctaaacctggcgattttgctaatactcaggcacgacatattgctactttctttccgggacgcatgaccggaactcctgcagaaatgttatctgccgattatattcgccaacagtttcagcaaatgggttatcgcagtgatattcggacatttaatagtcggtatatttataccgcccgcgataatcgtaagagctggcataacgtgacgggaagtacggtgattgccgctcatgaaggcaaagcgccgcagcagatcatcattatggcgcatctggatacttacgccccgctgagcgatgctgacgccgatgccaatctcggcgggctgacgttacaaggaatggatgataacgccgcaggtttaggtgtcatgctggaattggcagaacgcctgaaaaatacgcctaccgagtatggtattcgatttgtggcgaccagcggcgaagaggaagggaaattaggcgctgagaatttactcaagcggatgagtgacaccgaaaagaaaaatacgctgctggtgattaatctcgataacttaattgttggcgataaattgtatttcaacagcggtgtaaaaacccctgaggcagtaaggaaattaacgcgcgacagggcgctggcaattgcgcgcagtcacggaatagccgcaacgaccaatccgggtttgaataaaaattatccgaaaggcactgggtgttgtaatgacgcagaaatattcgacaaagcgggcattgctgtacttagcgtggaagcgactaactggaatcttgggaataaggatggttatcagcaacgcgcaaaaacacctgccttcccggcgggaaatagctggcatgacgtaagactggataatcaccaacatattgataaggctcttcctggaagaatagaacgtcgctgccgtgacgttatgcggataatgctacctctggtgaaggagttggcgaaggcgtcttgatgggtttgaaaatgggagctgggagttctaccgcagaggcgggggaactccaagtgatatccatcatcgcatccagtgcgcccggtttatccccgctgatgcggggaacaccagcgtcaggcgtgaaatctcaccgtcgttgccggtttatccctgctggcgcggggaactctcggttcaggcgttgcaaacctggctaccgggcggtttatccccgctaacgcggggaactcgtagtccatcattccacctatgtctgaactcccggtttatccccgctggcgcggggaactcccgggggataatgtttacggtcatgcgccccccggtttatccccgctggcgcggggaactctgggcggcttgccttgcagccagctccagcagcggtttatccccgctggcgcggggaactcaagctggctggcaatctctttcggggtgagtccggtttatccccgctggcgcggggaactctagtttccgtatctccggatttataaagctgacggtttatccccgctggcgcggggaactcgcaggcggcgacgcgcagggtatgcgcgattcgcggtttatccccgctggcgcggggaactcgcgaccgctcagaaattccagacccgatccaaacggtttatccccgctggcgcggggaactctcaacattatcaattacaaccgacagggagcccggtttatccccgctggcgcggggaactcagcgtgttcggcatcacctttggcttcggctgcggtttatccccgctggcgcggggaactctgcgtgagcgtatcgccgcgcgtctgcgaaagcggtttatccccgctggcgcggggaactctctaaaagtatacatttgttcttaaagcattttttcccataaaaacaacccaccaaccttaatgtaacatttccttattattaaagatcagctaattctttgttttcaaacaggtaaaaaagacaccaaccttaaaccatccaaatctaccggggtacgcctgtttaacccaaatgtctggaactcaaatcccgtttccgtattcgttgcccatgccatcactacattgccttcttccgccagtccagctatttgttcccagatcatttcacgaatttttgcggatacatcacctacatatacccctgcacgtacctccaacaaccagatggctaatctgcctcgtaagcgcggaggtacattttcagtgaccacgaccaacatactcatttcagctactccgatggcctgcatctcccagactaacaggaagcggaatggcaacaggctgtgcatcttcaggtggggccggcggttgtatttctccagcggcaagcacgtcctctataagcggaatcaatttggctaatgttttactactgcgaaaaatatccctgcacgccaaacggacttcccggtccggctcaccagggttacgacgcgctatctcaaaagctttcggtacaacagtgtcaaatttaatgatgtctgcaatatcgtaaacaaaggaaagaggctttcctgtatgcacaaacccaatagctggtgcataaccagctgcaagtatcgccgcttcagttacgccgtataaacaggaagttgcagcgctaatgcattggttgatcgtatcgcccttttcccagtctttcggatcgtagcgacgtccattccatgtcacgccgtattgcttcgccagaagtgcgtaggttgcccgcacgcgactgccttctatacctctgagttgctctacggagcgccgggcaggcgcaggttctccaaaccgaagttcaaacattttacgtacgaccttcagacgcaaatcttcatccagagcaagttttgcctgatagagcagcttatcactacgcgcacctccaggctgaccagaagcataaacacgaacgcccgcttcccccacccataccaacaatgttccaacttgcgcagccaggcgtacagctgcatggctaacccgtgtaccaggttccagcatgatgcaggcaacgctgccaacaggaatatgagtgcggatccctgtcttgtcgataagtacaaacgcgccatctattacatcgatctgcccatattgcagaaagatcatggagacgcgatctttgagtggaatgggattaaggggaagccaggtcattttattacacctcaatcacagtggagccaaagatagcaagccacatcccatgcttttagctggcccaataccttgctgtacaagatctattaacgctggcgcgtcgttgatggtgagcacaccttcaaagcaaaccgtttggatctttccacttttaccatcaccagaaaaatactgtggccgttcgcttatgggatgcacatcttcaacgcgcgccgcattgcccaatttacgttgcaaccacgcgatttgttctgcttcttttattaacggaacccgacagcgtttaatattccctttactgtccaggcgcttttgattgtcgagaatagttttgatcggatttgcccgaagccgaaaatagagtggaacaccaacctgaagttgaaattcaacctgtttagttttaatgactgtcgcaacggcagtactaacaggcatttgcgcactctgcaataaaacatgacagccttctggtgtgtttcgcttctcaacatgaaaaagaaaatcacgagcagcatccggtctgtttggaaataaatgccataatccctggtgaagttggtaaagatccctgctccaggccctggcaatgatgactttactgagatacatccatacctcctttaatcacataccattctcgggaagcaaattgtcgaggcaaggtgatcatcggttcgtcgcgcgccgtaaattttaaatgatgccctgtaacactttcctcactatatatatcgccgccaacgggctcataatttaatagcgccttctgaggatcgcttgcctgacatgtccccaaaaaaagcgggtgtgttagtgggcaacttctccgccccaggtaaggtgtataccgaggctttaatactgctttttcaagttcactgataaccatcgttgcatggggtgttaaccagagagcgacggtaaaggaggcatcacataaatattcgcgccatgtttgaatcgtttcatgacttttcaaaccacggtaatcttctcgcgctccaaggactgtatggtaatcacgcaaccccgttacagacacacgacgatcgtcaagaatgagttcatcgcagcgcactgcaaattgcacactctcacttaacgcctgtaaactagaagtatcatcacgttggatcccaagacaagccccgagtagccctaataacccgcttcgggtcggaaatcttccggtaggtcgcgttccttcaaaggtcggctgcccccaggcttgcattggcccagcaagccgcaagatcaaataagatctcatgttcacgcctcgccattattacgaacccaggattttaactgttctaaagtaggcatttgtttaacttgagcagtaattgggtctacatcagataagctgaattgcgcagcagctccgttcagaccatatccattggcaacgcgatcccaatattgattaaacgcctgtatagacggttgcaaaaagccatctttcgctttaaccgctttttcaaaagcatttgccatagaaagtggcatatcggagaaattaaccattaccatatccgcagggttaaaagcggcataagtacgctgttttgctccagggacctctgttgccagcatatgaacaacatgggttgcaatttccagagcctgctccctggaggcaccacctaaattttcctgaagttgagcgaggttaatgttggcataacgataaaaaacaccgctactaaattcctgagttcccagatgtgcagaaccttgttcctgtaaatcatctacagcggtgaaccagtcaatatcagaatcaacctgatgagtagtgatcgcatgcgcaatggacattgcaccatcaacttttcccaactcagtcatcatgccgctggttgccattcttccactaagcgcaatatcaacaccctgctgtaaattcacacgtatggcggcaatatcttccttaagaactttgagcagctttttatcatccagattatcagcctctgcttttgcaacctgctcacagaaccaggctatttctcccacaacccagggagtaaccgcatcggcagaaatcttttcggcttcatcaacacttttaccggagagcagcgctaatgtcttatcgatgattttttggtcaaaacgttcaccaagtttttgccgaagaacatcacgtaattgtgcaagatgaatggttctgagactggattcaccaatattttgtgcgtaataaccacttttacgcatcgcacgtttaaggctttgactactaattcttactcgtcttttgccgccgaaaatagcgtctttctgcatgttcatatcgtcgcggttcagacaactagggctgtgagagatcagaacatgaatattgataaagttagacatagaaaggtttccttacgcatttttgtttgtggtcaatacaaaatcttccagaagttgctggcgttcgcgctttccccaccaggtcaacatcctggccattaatggccagtcaagtacgggttcggcgtgagtaagtaatcgacgtaactggaccatatcggctgttctgtcagcccgaattaattgaaagatacggcgctcgttaattcttccactattggctaaagctcttcccaagctgatacctgttgtttgctcgctttttttgtcctgatgtcggatgacattctttcctgcgctcaggcaaaacaccatgcgcaaaagagcctgctggtgacgtgggttttcccaaccaaaaggttgcaccagcctataaaacgcagggatatcgcgtaattcatcaggttcactaacacgtctaatttgcgcacaacttccattatccagttgttgccaggctcgatataaagccattgcatcaatttcatcagccattacttggccctccttgcggttttaactcccgtaaatgtttgtatagcgtggcgcgggcaagcgctaatgtgcttattaatttaggatgatgtgcatagggagctacagattgattaaatagcatttcacacaattgatgaagtttgtctcgtaaatcagctattacctcatcagcctgggaaaaattaacattcgccagtacatcgggaattaataattcactctgtcgatagaaatgcctttctgcagtctcatgaacagagactccggcccctttgaagtctttatttttaaacccttctgcaaaggtatataacgccttgcgtaaggctgttttatatcccaaaccaacagtcactatttcgtttatcacattgccgtattgttgccacccctgattaaacatcaacacatcatgacgccgttcaagaatagatgcttgattattacgatatccccccataatcaattcaagaggactttgcggcgcaatatttctgaattgattcacaaccgccgccacgcgatttccattttcattttgaataatcttatctaccacaactcggctgatttgtgtccaacttggtgcggaggtggtgaaagcaagaaatttttcctcaacctcccctttcttgactgttaccagacaaggggaatgcggatggggccatagcccattaactgtaaaggtaaatttttccttaagaaaaccggtataacgcaaattgctttcctgtccacagcaagaacatttaccaatcccaatgggatcgcataattcaatatgcgctggttgccagaatagaccacggacaaacccaatactgctagcaggtatagactcattggacttgataggtttaatccaggtaggttggttttccgtatgactttcattaggaaattgtttttgaagacgaggtaatgtgaggacattgagtaacaccgtactacgaagatcgatcccacgtacgaacgttgttacaggtgttcctccacgtaaaccgcttttaaaaccaccaccaaaacctggtgcctgattcgcctggttgaataacgcaatcgcagtgcatccaccacataatgcttcaccctgccccggttgattgacaaatgcacaattcgtcgcgccgcttaccccagccaacagtttttccattggagtcacatcatttgctttgacacctttggtctgcataaagggatgttctgcgtgattaaggtagaacatatctatccacggcgcgatgagttgttgaaactcatcttcagtgagcggattcattatgcgatgtcgaaattcaacgtcatcttttgccggggcgataatttgcccaatgcaaaccagcagtgctaaagcggccagttccatatcgtcacggggcaaacttaatcgccactgatctctactgcagtataggctttgcagatttatgatttggactttccccccgtttcgcgggcgtacagggatccagttatcaataagcaaattcatttgttctccttcatatgctccgacatttctcctgcatttctatacgtcggcacacttccgttatcggtaaaaacaaagaaaaaatacggcgtaattaattcaataatcacattcactgcaaaaatatattcattggtttaatacaattaacctatacatatattaagatgtgttgaattgtttaaagacaataatgcatgcatttcaaatctgcaagttattcgttttattattaaagaaacttttagttataataattaccatgaattttattacataaaatattcatactgtgaatataaaatctcataccgggaaattaaaagaagatgtacattgtgcaccttccctacttaagtagggataaaccgttattggtcttattatcgtcattgataacaatcattcccgaagttatttgggatttgcagggatgactctggtcatcccttcatcccctgtataggtaataacaatactgttaccctgccagacccatccatccagattctgtttcccttccagccaaagtaacccatcttcatctactacttcagaaaaactacgtttccaggtgaagggtacattgacgcgattaagtgcaagcgcctcatactgctgttcatgacttaggtcctcgtagacctggccatcgagcagttgtttaccactagacgtttgtacataaggcaataatggcaggctcatttccccatccctcgttaccgcaagaatggtttcatcgttatcctgcaagctatattcttcagcccactgcaggaccttgcgagccttgaaccttttttcacactcggcgctttcaaatttatccatgccattgccgacccattctggctcatccatttccgcatcatcgtaaatgctatccagccattgccggtaagcatcagggaaaaataaggatgctccattaagctcctcaatatgttgctgcgtccgccacatgactctaacgttgctataaatatgctcatgtcgtccgtaaccctcgccatcaggcagcaaaatggtggcaacaggaatctcaaaaccagcgggacgatatttgcgatgatggcgatgtaaacggcccaatcgttggaaaagcaaatctgcaggacaatgctgagtaattaaccaatcaaaatcaacgtcgagactttgttccacgacctgggttgcgacaagtatccgtccaacatttcgcttcccatttttgccgaaattgctaataactcgattctctttttcacgacgatcgttcagcgtaaagcgcgcatgaaacaaatctatatctacttgcgtgttatttagctcctttagccgttggtagcatacttgtgcaacgtcaaccaaattgcaaataagacagacctgtgcacccgcgtttgccgctgcgatcattcgctctaacatcgtaaggtcaggtaacatgtcagctaaacaaataggttctggctgaatgctaaagcggggcgggagttgttctggatgagctagcagatcaaaacgttgcgcaccattcacacctcgccagttaatgagtggatatgcggagttattttccactggatctgtatgcagaccataagtatccagaagtttctgtttttgtttcattggtagggttgcggaaagaagaataacactccctcccacatcagcctgagccttgagcactgcctccagcaagccgttcatataggtgtcgtaagcatgaacttcatcaacaattaaaacacttcgaccaattcccaaaccacggataaagcggtgtttaactggcaatacgcttatcaacacctgatcaatcgtgcaaacgccgatttgcccaagaaacactttcttattgctttgactcaaccactgacaacactgaacccacgcttcttcttgcccctgttcagtaatcgcgcgactttttatactttgaaagaggtggttaaaccgactattgccatgagcaagaataagatttggggaactaaataagtggctcgcgctcgcttccattctcgtaagcatagcattcgcggtagcttgtgttgggagggcaaaaataacactatccgcaatttgttgatcaataagtttccaagcataggccagcgctgtttccgttttaccggagcctgtaggtgcctctattaccgtcagcccgggagctactggaagagcatcaactaacacctgtaattgtctgggttgatagccattgtccagtagtgcatgaacaccttcataacatcgcttattacttacaagtccactcaactccaatacccggctcgcatcctgctgtcggtcctggaaatacgttctcagagcatttatgtcggaaggcgcatcctcattaaacagaaaggtattcgttgtagtccaggagcctaaccagtcagcaaggctgcaaaaacctgctaacagactactacaatcaggtggtatatcgtttatagataaccccgctggcgttaaaaataatgcttccagtacagatatccactcctcacgagcctgtttatcttgcgcagcataagatgccagagaagctggcatttcccaacggctcttatcttgatcctgggaatgtaatataaaaccatgatgtcctgtaacggcctctacccatggaaaccaggactcataaggatgaggagcggcatcaaaaaaactgaaaaaatccccgagagattgctcactaagactatcctggttaaaccaatacagaccggctgcaccatgattaaatttacggcacatttgtgtacttggaccattaagacttggcgttgcaggatttaatttcagccaactttctgcacttttatattggaatcgtatatcaaactttccaatatcatgaagagcaatgaaaaataacagccaggccttcaccctctgtttacttagcatttcatttcggcaaaaagtattttgcagtacgacactttgatcccaccagcaatctgcaacagcagcaacatcaaggcaatgataaattaacagatgaatatcatttcctttcgtcaagcttttactggattttccccagtaatggcatatatatttaaaaggttccattaatagcctccctgtttttttagtattatcgatgatatcagcgggctatttttcgatgctgctcataaatatcgaattacagtgatatacacatgtcttgcctccctgcaaagaagagactaacattcgaattgtttgggttcgaacgctggcctcaggttgatagaaatatcgcctggggcttttgtccatctggaacctcgcgaatgcttaacgccagacagcctcaagcacccgacgccattctatacctgataattcttcccgcggcgttcacgtttaaaatcaggaatgctgctcgcaaaataaaaacgcccccatcatttctgacagaggcgtttaatttgtccggcaatatttacccttcgtgtaacccacattccctttttaagccaaagaaacgcgtttcttcttccgccatgccgggttcccatttacgggttgtatgggtatcgcccacgcttaaatatccttcatcccataatgggtgatatttcaggccatgtttttgcaggtactgataaatagttcggttatcccagtcgataatcggcagcactttaaatacgccacgctgaattgccagcaccggtaaattggcacgactgccggattgttcacggcgcaggccagcaaaccaggtttgcgcattcagttctttcagagcccggttcatcggttcgactttgttgatgtcattgtacttttcaatgccttcaacgccctgctcccacagttttccgtagcgtgcttcctgccaggctgcgctttcggtagcacggtacactttcaggttgagcttgagtttgtccgttaactcgtcaataaagcggtaggtttccgggaacaagtaacccgtatcggtgaggatcaccggaatatccgggcgaatttgattcaccagatgcaggctcaccgccgcctgaatgccaaagctggaagaaagtacatattcaccgggcagattatccagcgcccaggctacgcggccttcagcgtccagtttttccagttcggcgttagtttccgccagcgccagaatgcgatctaccttcggcagttcgttcagggcgtttagatcgagtttggacatagattcctcactgtttgccttgcctgatgcgacgctcacgcgttcttatcaggcctacaagaccgggctgatggttaatcccacaaatcacgcgccggatcgagcaccgggcgaatgatgcccgcacgcaccgtaaagtcgccgaagccttcacccgcttcgcgctctttcgcccagcgccctatcagttcatcaaggctcgccaggatttccggctcggtgatgttttctttatacatccgtgggatacgtgtcccaatgcggttgccgccaagatgcaggttgtagcgacccggcgctttacccaccaggcccacttccgccagcatcgcgcgaccacaaccgttcgggcagcctgttacacgcatcacgatatgctcatcgctgacaccatgtttcgccattaaattatcgatgttgtcgataaaagacggcaggaaacgctctgcttccgccatcgccagcgggcaagtcgggaaactcacgcaagccatgctgttttcacgctgcggcgtgacggcattcattaacccgctctctttggcgatcttctcgatcttcgctttctcgctttccggtacaccggcgatgatcagattctggttcgccgtaatgcggaaatcgcctttgtggatcttcgcgatctccagcaggccggttttcagcggacgcgccggataatcaaggatgcgaccattttcgataaacagcgtcaggtgccagttatcatcaatgcccttaacccagccaatacgatcgcctcgtccggtgaactcatatggacggatcggttcaaatttgatccccgcgcgacgctccacttccgctttaaacgtctcaacccccacgcgctccagcgtgtatttggttttggcatttttacgatcggttcggttaccccagtcacgctgagttgtcacgacggcttcggccaccgccagcgtatgctccagcggcagatagccaaactcactcgcggtgcgggcgtaggttttcttgttgccgtgttcgatggaaagcccaccgcccaccaacaggttaaagcccaccagcttgccgttttcggcgatcgccacgaagttcatgtcgttggcgtgcagatcgatatcgttctgtggcgggatcactaccgtggttttgaatttacgcggcaggtaggtctggccgaggatcggttcttcatcagtagtggcgactttttcctggtcgagccagatctccgcatacgcgcgggtacgaggcaacagatgctcagaaatcttcttcgcccactcgtacgcttccgcgtgcagctggctctcgtaagggttgctggtgcagagtacgttacggttcatgtcgttagctgtcgccagcgcatcaagaccgacgctgtgcagcatctggtgcaccggtttgacgttctttttcagaatgccgtggaactgaaacgtctggcggttggtcaggcgaatgctgccatagatggtgttttcaccggcaaatttgtcgatcgcctgccactgtttagtggtaatcaccccacccggcagacgacagcgaagcagcatcgcgtggcgcggctccagcttctgttcagcacgttcggcgcggatgtcgcggtcatcctgctgatacatgccgtggaagcgaatcagcaggaagttgtcgcccttaaagccgccggtcagaccgtcgtttaaatcttccgcaatggtgccgcgcaggtagttgctttcatgcttcatgcgctcggcgtctgtcagttttccttcgaccactaaaggccctggatgtttttcgctcattagtagacatctcgctgataacggcgctctacgcgcagctcacttaaaaattcatccgccgcttcggtgtccatgccaccaaattcggcaatcacttccagaagtgcctgctcaacgtctttcgccatgcgattagcgtcgccgcagacataaatgtgggcaccatcattgatccagcgccacagctccgcgccctgttcgcgcagtttgtcttgtacgtaaactttttctttttgatcgcggctccaggcaagatcgatacgtgtcagcacgccatctttgacgtagcgctgccactccacctggtacaggaagtcttccgtaaagtgcggattaccaaagaacagccagtttttacctggcgcttcgtcggcggcgcgttgctgcataaaggcgcggaacggcgcaataccggtgcctgggccaatcataatcaccggggtttctggattggctggcaggcggaagttatcgttatgttcgataaatacgcggacttcgccctcttcttccacgcggtcagcgaggaagctggaggcaccaccggcacgggcgcggccttccacgtcgtaacgcaccacaccaacggtgacgtgtacttcgttctcgacttccgcctggctggaggcgatggaatacagacgcggcgtcagcgggcgcagcagattaattagcgcttcggcatcaagctgtgccggggagaaacgcaccatgtcaacaatcggcgtcgtcgcggcgtaatgctgtaacttcgctttatcgcccaccagcggcagcagtgtttcactgcgggtaagcgtggcgtaattctcaacaatgttggcggtgttgacggtcagttcgaagtgccactgtagcgcttcgttcagaggcaacgttttgccctcgacggtgacaggttcatcgcctttcagccacagcagttcgacaagttctttcaccagtgccggatcgttctgataccagacgcccagcgcgtcacccggctggtaacgcatgccgctgtcacctaagtcaatttcgatatggcgaacgtctttttcagagttacgcccggtaattttctggttaacagagaggctagccaccagcggcgcgtctttgctgtacgggctggtgtggatttcatttaccgcgccagtagcgacggattggctaggtgccgcgacaggcgcacggcttttaagcgcatcaaccacgcgggcgcgccactcgctggcagcagcctggtattcaacatcggcatcgacacggtcgagcaggcgttcaccacccagttccgccagcttgctgtcgaaatctttcccggactggcagaaaaattcataagagctatcgccgaggctaaacacggcaaacgcggtgttttccagctttggcgcttttttggagaacaggaacttatgcagcgcgacggcttcttccggcggttccccttccccttgcgtactcgtcactacgatgagcagtttttcgctggcgatttgtttgaatttatagtcgcccgcgttcaccagcttaacgttcagttttgctgctaataaatcatcacgtaatgcttcagcaacccggcgcgcattgccggtttggctggcggagataatagttatacccggcatttctgcggctggcgctggcgtcgctgcaagcgcagcaggctgctgattgagtacgccccagaaatagccagaaacccaggcaagctgggtgggagttaaatcggtcgtggccgcctgaaggcgtgccagttgctccgggttcaacggaagcaacgcggaaggtgggacctgtgtcgtcatgcgtcgttatgttccagtaagcaaagctgtttctgcgccctgtcagcgcccataaaacagaagagaaggtaaggttaacggggcaaacggtgtggattaaagacgggatagcgataactaataaccaaatcgactaacctgttttagcaatagtctttaacaacaaaatagattaaccaacctaatgaaaaacaaatgaatttagccaatcattaagataaatcagcgattttgcgcaacaaagtcgttttagataatgcgaaaaaacagcctttccggtactctacggcggttttatcgtcctgtagagaaattatgatgtccaccacgttatttaaagatttcaccttcgaagccgctcaccgcttaccacacgtcccggaagggcataaatgtggtcgcctgcacgggcattcctttatggtgcgactggaaattaccggggaagtcgatccgcatacgggctggattatcgatttcgctgaactaaaagcggcgtttaaaccaacctacgagcgcctcgatcaccattatctcaatgatattccaggtctggaaaacccaaccagcgaggttttagcaaaatggatttgggatcaggttaaacccgttgtgccgctgttaagtgcggtgatggtaaaagaaacctgcaccgcaggttgtatctatcgcggcgaatgataagagtgtgtcggcggtcaatttcccttaagtaacgctatgttagggtgttgtgttctggatatctggggcatgacatggaagacgactgcgacattattattattggtgccggtattgcaggcaccgcttgcgcgttacgctgcgcgcgagcgggtttatccgttttgttactggaacgcgctgaaatccccggcagcaaaaatctttccggcgggcggttatatacccatgcactcgcggaactcctcccgcaatttcatctgaccgcgcctcttgaacgacgcatcactcacgaaagcctttccctgttaacgcccgatggcgtaacgacgttttccagcttacagcccggcggtgaatcctggagtgtattacgtgcacgattcgatccgtggctggttgccgaagccgaaaaagaaggtgtcgaatgcatccccggagcgacggtggatgcactgtatgaagaaaacggcagagtctgtggcgttatttgtggtgacgatattctccgcgcccgttatgtggtgctggcagaaggtgccaacagcgtcctggctgaacgtcacgggttagtgactcgtcctgctggcgaagcgatggcgttggggatcaaagaagtgctgagcctggaaacatccgctattgaagaacgttttcatctggagaataacgaaggcgcagcgttgctgttcagcggcaggatctgtgatgacttacccggcggcgcatttctttatactaatcaacaaacgctcagcttagggattgtttgcccgctctcttcccttacgcaaagtcgtgttccggcaagcgagctgctgactcgctttaaagcgcatccggcagtgcgcccgcttatcaaaaacacggaaagtctggagtatggtgcgcatctggtgccagaaggtggcttgcacagtatgccggtgcaatacgccggtaacggctggctgctggtgggcgatgcgttgcgcagttgcgtcaataccggaatttccgtgcgcggcatggatatggcgctgactggcgcgcaggcggcggcacaaacgctgataagcgcctgccagcaccgcgagccgcaaaatctgtttccgctttatcatcacaacgtagagcgcagcctgctgtgggatgttctacagcgttatcagcatgttccggcgcttttgcaacgcccgggatggtaccgtacgtggcctgcgttaatgcaggatatttcccgcgatttatgggatcagggtgataaacctgttccaccgctgcgccagttattctggcatcatttacgtcgtcacggcctgtggcatctggcgggcgatgttatcaggagtctgcgatgtctgtaacgtaagatgttatcaggagtctgcgatgtctgtagcccgtaatctctggcgcgttgctgatgcgccgcacattgttccggctgactccgttgagcgccagacggcagaacggttgattaacgcctgtccggcaggtctttttagcctcacaccggaaggtaacttacgtattgactatcgcagttgcctggagtgtggcacctgccgtttgctgtgcgacgaaagtacactacaacagtggcgctatccgccttccggattcggcatcacctaccgctttggataaataataaggataatttatgcccctcttacacctgctccgccagaatccggtgattgctgccgttaaagataatgccagcctgcaactggcaatcgattctgaatgccaatttatttccgtgttgtacggcaatatctgcaccatcagtaatatcgttaaaaagattaagaacgccgggaaatatgcttttattcatgttgatttgctggaaggcgcgagtaataaagaagtcgttattcagtttttgaaactggtgaccgaggcggacggcattatcagtaccaaagccagtatgttgaaagcggcaagagcggaaggttttttctgtattcatcgcctgtttattgttgatagtattagctttcacaacattgataagcaagttgcgcaaagcaatccggattgtattgagatcctgccaggctgtatgcccaaagtgctgggctgggtgacagagaaaatccgccaaccgctgattgccggtgggctggtgtgcgatgaagaagatgcgcgtaatgcgattaacgcgggtgtcgtggcgctttccaccacgaataccggggtctggacgttagcgaaaaaattactttgacgggataatcgtaaccaattgaatttggtttgatttgtaggccgcacgccacatccgacattcagcgcctgatgcgacgcttgacgcgtcttatcaggcctacaagtccccaggccagaaccgtaggcaggatcatccggcaacacgttattggcaatctgcgtgaatgtttgtcaccagtgcctccagcaccactttccagtcatcaaccacgccaacatctgcctgactaaataccgcagcgctggcgtcatgattaatcgccaccacaaacttgctattgcgtacgcccgccattaacgctgctgcgccagaagcgccaacaacaatacacacctcaggtgccagcagatgtccggaaataccaatcactttttcagcatcaacgccaccgttcatcactcgcgcccgactgtagcccacttcggctcccagcttttctgccagcatagcgatttcctggttatctgcctctccgccctgccccaccaccagcacccgtctggcctcagctaatgggtcgcgggtaacatttttcagatcctctgtgctaaccagccagtccggaagcgcacccgggacaatgttcagttgttgcattccagagggcaacgtggcgtttttcgctgctcccgcctgacgcgccagggaaaggcatagcgggcgtttttctgtttgcagcgtcgccgttagcgcatttccccagtgggatttgcgcacgcttacggttggaatatctaagctagtcacctggcagatgcttgcaccatgtaaacgccaggccagccgggtgctcagttcatcgccaaacgttcccggcggaaagagaacaacgtccgcaggcgttcgctgccactgttccaccaacgcatccagcacctgttccgccactacaggctgaggttcaatctgccagtgcgccagggtacaaccgctgaaatcctgcgccgccagccagcttgctattgcggcattctcctgatttattgtcacaattgcgatattcatggctgcatcctttggcgtaaatagtcctgccatagcttttgagctttttctgctaccgtttgcccatcaatcagcgtcgctccgcgtcgttgctctgctcttgccagttgcagacactgcatcgctggcatttcggcagcaacagttttacggataatttctgctttccccgcagccattcgctggcgcattcccggtactggcaaggccacttcaccgcactgacgcacggcaatcaccgcaggcaagcgaacccggcaacaacgcaacccatgttcagtacgctgttcgagggtgataaacagcgcgtcgagagtgaaacgctccacctgggtgaagcagggccagcccagcatttccgccagcaaaaatggcgtttgcccattctgcccttcgctgctttggcagccggtaattatcagatccagcggattctgatgctgccattcggcaatatggcgagcgacaaattccggcgcaaagcgcagatctgccgccgtctccagcaatacagcttcctcaaacccaagagccatgagatagcgcagccagtgcaatgcccgttcatcccccatgctcaacgcggttaaagacatcggcgtaccgttttttctctgcgccaacagcagcgcggcagcggcctgttcatcagcaccgagtaaacttcgcagtaggctaatatccggtccgcttttaccctgagccgccgcctgccactctttttccgccagcattccggcatccggttcggctttaaacgctaacagaatgttcattcgcacctcctacatttcccgccgccaccagcgggagggctttagtttctggtgcccatagccaggtcacaacaaaaccaaccaacaacactgtcgccaggagcaataaggtgacttgcattccccactgcgccagcacccacggcagcaggccagtacttaccgccgcgccaagtcgactcatggcagtggcaaaaccgacgcccaggctgcgaatgtcagtaggaaaactttccgcaggcaaaatgcccaccagattactgactgcgctaatggtggtgctgaagagaacaaaaagcagcagcgttaaactactgccggaaggcaaacaggccatgactaccagcgttgccgccagcagcaaaaaacttcccagcaaaaatttgcgatgtgccagcaggtgcgtcagaactaatcccagcagcgcgcccacaattaacaacgcattaagcatcaggctggcagtcagcgcatcttccagaccaatagtctgggcgatagttggcagccaggtataaatcacaaaccatgggattacgaggcagacaaagaagacgctgttaaacgccgtgcgccgccagtaacggctagagaacaaggttttgatgtgtttatgggtcgccgttaccacttcatcgcccagtaaaacatggggaccaaaatagcgatgcacgatagcgtgagcttctgcaaaacgcccctggcgcagtagccagcgtggactttctggcgttccccagcgtaataacgtaatcaacaacgcgggcagagctgcgcttgccagtagccagcgccaggcctccgggttttcggaaataaagtgatgtccggcaatacttgccagcacatagcctacggtccacaccacgctgaatgcgcccagcaaaataccgcgatggcggcgcggggaaaattcagccagcaaggtgtgacctacactataatcgcctcccagaccaatgccaatcaaaatgcgcagtccaataagatgctctggcgtggtggcaaaaaattgtaaaaagctagcaagcgtaatcagcaaaaagctgaaggtgaagattttttgccgaccaatatggtcggagatccacccaagaaccaggctgccaaggaacaaaccaaggagcgcgctgccgccgatcattcccgccataaacggcgtcagttgcatggcgggcgtaagctgaataatggcgtaaccaatgacgccgagaacataaccgtcggtcaggtgtgcgccgaaagtgagcgcagcaatgcggcagtgaaaacggttaagcggtaaatcatccattcgcaccggactagtgttcatctttaccccttcattgtccggtaataagaacggcttctcgcctgagaagccgaaaaggcaacgccccgtcatcgcggaacgctgcctgacacattatttttcaatcggatagatagtacccgtattcataatgccattaggatcgaactgctttttcagcccttccagcaacgcccacgcgctgccgtgttccagtttgctccagtgaacgcgatgtttaccgataccgtggtggtgcaccatgctaccgccgaggcgaatggtttcttcacagatgatcttgttgagcggattgtggtacttgtcgatttcctcttccggcttacagtcaacgacgttgtaatcgtagacgaagtacatgttggtgccgttctgatagctatgagaggaatgaccgcccagcatggtgatgtcgtcggcgtgcgggaactcagtacgaatacggttaataacgctttcgtagatttcgtggatgcagctccagcagccggatacttcggtggtaaagcccatgttgccggttttgaggatctgcacacgttcggcagccactttatccggtccccagttcaggttgttaaaccaggtttcgatcagcttgctgtccacgcgctggcattgcgggtagcgggcaacgatttccgcaatcccttcgcccgtcaccttcgcaatgcgagggttaccttcagccataaagatcagcacgcattttccgtcggcaaaatgggtgaagtgttgggtgccatcttcagcgtcatacaaacgagcgatactcggacgatacccttccaccatgatttcacgcaggatgttgaagccggttttcatgtcttccaggatatagccgtagaagaggttgttttccggggtgaatttaaagattttcactgttacttcagtgatatagcacaatgcaccttcgttgccgatgatgatgtgacgaatgtccgggccagccgcgcggcgtggcacgtttttaatgcgtgtgacggtgccatcagccaatactgcttccagaccaacgaccatatcttcgattgcgccgtagagtgtggagaactgcccgatacttcgggttgctaccaggccgcccatctgcgccagcggcttactctgcggagaatgccccgtggtgtaacctttttcacgcaacgcgttttccagcacttccagcggaacaccacattgcgccgtcgcctgcatattctcaatatcaatattaatgatttgattcatggcggagccgtcgagcaccacgctgttttctacaacagtttccagcccaccttcggtggcggaagcaccggtacgcggcacaccgttaattttgtgcgcattcataaaattcagcacacgggatacttgctctgtggaaccgagttttacgaccgctgccggaatcggcaaagtataaatgccatgaatatccggaaatttacgaaaacggtcaatactgtttttctttaatactgtttcatcggtaattacgcgatctgcaccaacaatttcctttagctggtcgacaatcgctgcgcgagataaagacatagtaattccttcctgataataaaaatggaataatcattaataagagaaaacagaaaccaccgttatgggttagcgcactaaataaccgccatcaaccactaataaatgcccgttgacataattgcttgccggacttgcgaggaatacggctgcgcccattaaatcctgagtatcgccccaacggtttgccggaatatgatcaagaacgcgctgattggtttctggattactgcgtgtcgccagcgtaatatctgttgcataatagccaggggcgataccatttacctgaatattatattgacctagttcatcacaataagctttggtgaacccggcaagagcatgtttagtggcagaatatgcaggactccattgtccacctaagtaagagaacaaactacagatattaataattttgccgcttttctgcgggatcataatttttgcagcttcatagcttaactcgaatgcggcggtcaggttcacatcaatcatcggatcccagtcggcacgaccgaagtccagcaccttattcagcttacaaataccggcattgttaaccagaatatcaactgtaccgaaacgctcacagcaagcagcgataatcttctgcggcgcgccttctgcggtgatacccacctgcatgaagtccacctcaacaccctgtttttcaatcatttcctttgtttcgccgttatctttgacgaaactaggaataaagatatttgcgccagctttggccaacgccatggcaaatgcctggcctaaaccgctattcccaccggtaacaattgcggttttacctttcagggagaaaaaatccatactgaacgcattgagagattcgatactcatagttagctccaatttccgtaaggcaaaaaaaaagaaaggtaacttcccccgcgagagggaagttacctttctcattatctctggtaactggagataatttttagcataagggcataactgctaatgtgatcgtaatcacagtgtgatattcgtattgtcaaataattttaaaaagcagaagcgtgattactctcacacaacacctctgctttccatgttatttattatttcaattactagagacctgagaaaagtaatccacctgaaagggcggcttacttttctcttttttttgtctattacaaatgggaatacgatatgcaacacaacagttatcgccgttggataaccctcgcgataattagttttagcggcggcgttagtttcgacctggcttatttacgttatatttatcaaattcccatggcgaaatttatgggattcagcaataccgagataggtttaataatgagtacctttggtattgcggccattattctttatgcccccagcggcgttattgccgataaatttagtcaccgcaaaatgattacttccgcgatgatcattaccggattactgggtctgttaatggcaacgtatccaccgctgtgggtaatgctctgtattcagatcgcctttgcgataacgacgattttaatgctgtggagcgtgagcattaaagctgcaagcttgcttggcgatcatagcgagcaagggaaaattatgggctggatggaagggctgcgcggcgtcggtgtaatgagcctggcggtgtttaccatgtgggtcttttctcgctttgcaccggatgacagcaccagcctgaaaacggtcattatcatctatagtgtggtttacatcttgttggggattctgtgctggttttttgttagcgataacaacaacctgcgcagtgccaataacgaagaaaaacagagtttccagcttagcgacatcctggccgttttgcgtatcagcaccacctggtattgcagcatggtgatttttggcgtcttcaccatctacgccattctgagttactccaccaactatctgaccgaaatgtatggcatgagcctggtggcggcgagctacatggggattgtgatcaacaaaatattccgcgcgctgtgcggcccacttggcggcataatcaccacctacagcaaagtgaaatcccctacccgcgtgatccaaatcctttccgtactcggcctgctgacgttaactgccctgctcgtcacgaactctaacccgcaaagcgtcgcgatggggattggcctgattttactgctgggattcacctgttacgccagtcgcgggctgtactgggcctgccctggcgaagcgagaacaccgtcttacattatgggcaccacggtaggtatttgtagcgtgattggattcctgccggatgtcttcgtttacccaattatcggccactggcaagacaccctgcccgctgcagaagcctaccgcaatatgtggctgatgggcatggcggcgcttggcatggtgattgtctttacctttttgctgttccaaaaaattcgtactgctgatagcgcccccgcaatggctagcagcaagtaagccaggaaaattacaggagaaaaatcatgagcaaaaaatacatcatagggattgatggcggaagtcagagcacaaaagtggtgatgtacgatctggaaggtaacgtggtttgcgaaggcaaaggcttattacagccgatgcacacgccagatgccgatactgcagaacatcctgacgacgatttatgggcaagtttatgttttgccggtcacgatttgatgagtcagtttgccgggaataaagaagatattgtcggtattggtctgggatccatccgttgctgccgtgcgttattgaaagccgatggcacgcctgctgcgccgttgattagctggcaggatgcacgcgttacacgcccttacgaacacactaaccctgacgtggcatatgtcacctcttttagcggttatctgacgcatcgcttaaccggcgagtttaaagacaatatcgccaactattttggtcagtggccggtggattataagagctgggcatggagcgaagatgctgcggtaatggataagtttaatatcccccgtcatatgctgtttgatgtgcaaatgcctggcaccgtcctcggacatatcacaccacaagccgcactggcgacacatttcccggcaggactgccggttgtttgtaccaccagtgataaaccggtagaagctctgggggccggattactggatgatgaaacggcggtaatttctcttggcacttacatcgcattgatgatgaacggcaaagcactgccgaaagatccagtagcgtactggccgattatgtcttctattccgcaaacattgctgtatgaaggttacggtattcgcaaaggcatgtggacggtgagctggctgcgcgacatgctaggcgagagcttaattcaggatgccagggcgcaggatcttagtccggaagatttactcaacaaaaaagcttcttgtgtgccgccaggctgtaatggtctgatgacggtgctggactggctgaccaatccgtgggaaccgtacaaacgcgggattatgatcggctttgattccagcatggattacgcatggatatatcgtagcatactggaaagcgtggcgctgacgctgaagaacaattacgacaatatgtgtaatgaaatgaatcactttgcgaagcatgtgatcattactggcggcggtagcaacagcgatctgtttatgcagatttttgccgacgtgttcaaccttccggcacgacgtaacgccattaacggttgtgcaagcctgggggcagcgattaatacagcggtaggtctggggctatacccggattacgcaacggctgtcgataacatggttcgcgtgaaagatatctttataccgattgagagcaatgccaaacgctacgacgcgatgaataaaggcattttcaaagacctaaccaaacatactgatgtgatcctgaaaaaaagctatgaagtgatgcatggggaattggggaatgtggatagcatccagagctggagcaatgcgtaagtgaggaaggccgggcgggaaactgcccggcctgaacatacctgaatggttatccccgctgacgcggggaacataagttcgacaacttaaaaaatgataacaagtccggtttatccccgctgatgcagggaacataataaaaactttaactagttcggtttatccctgtttttacaaggaatattaactacactcgatgtctttagaataaaagacaatacgaatcgcactttatcaattttcacttaaagtatgaactggatatctttattcataagaactattcatcaacagcgtatagaggcggttatgtaaaaccactcattagcctcaaaacaaagacaaacttccagatttattacttaaccaatgaataacaagcttaaaaaatatactgttattctaaagaaaaaattaacaggcattaattcaatattaaaaaaataatagattaaaatttcttaacgatttaagaatcatacaaataacactttgattaaatttaattttttgtatcgataattgtgaacctctctggcatggagaactattttgaacatgaggtgttacgtggatatgttgcttattacaagtactgctaatataaaaacttgagaaagagataacgggttatatggtggtttatccccgctggcgcggggaactcgacagaacggcctcagtagtctcgtcaggctccggtttatccccgctggcgcggggaacacctgttttcgcaaatctatggactattgctattcggtttatccccgctggcgcggggaacacgggcgcacggaatacaaagccgtgtatctgctcggtttatccccgctggcgcggggaacactggctctgcaacagcagcacccatgaccacgtcggtttatccccgctggcgcggggaacacgaaatgctggtgagcgttaatgccgcaaacacaggtttatccccgctggcgcggggaacacattacgcctttttgcgattgcccggtttttgccggtttatccccgctggcgcggggaacactctaaacataacctattattaattaatgattttttaagccagtcacaatctaccaactttatagtatcacacaaacaacacatccattatgttaaagagcacttaatccattgattaaaaaggtaaatatttaaaataactctatacaaactaaaatctaccaaactttaccgcaataattttcactccagcgaaaaattaatgccacagaatttgtagagaatgctaatgattagccctggatgggtaaaatggaggagttttcagaggcgacaaacaatataaatgagtagaagtctttacaggttccacccatttataacgcttataaatgtttaatcaggcaatatttagatatttatgtgtttgcatgctcaaacgccaattacgcgcaatgcaggtttcaatgcacaaacgtgtggcatcatccttttggctaatcggctgcagtgcaatgactcgcggtttatcatcggtcagcgttgccagtagttcatccagtgcttcaatatcgcgtacgcgccccactggatgcttgatttcgttggctcgctccagtgcctgactcaacacttcatagccgccgcgcatgttcagctttgggcttacggtaacccaggtattcggtgtgcagcgtacctcatgagtaccactggtttcgatctggcagctaaaaccgttcttttcgagcagatcagtcagtggcagcaaatcatgaatgcaaggctcaccacccgtaatcaccacatgccgcgcggtgtatccctggcgaccaatgacagccagcaaatcttcactgctcgcagccccccacttatcactctctttggtcttcgccagaatgctgaaaagggagacttcccgatcctcaagcttttcccaggtgtgtttggtgtcgcaccaggcacagccaaccgggcatccctgtaaacgaataaaaatggcgggaacgccggtaaagtaaccctcaccttgcagggtctggaacatctcgttaatcgggtactgcatagcattctctgtgaagtggataattgttaattattgcagatcctgccacaacaatcatgtcttattaacattctgttacaggcaggtttaaagaaaaatgcgaaacatatcgttaataattaaagggagtaacgtattatgtcagaagaaaataaagaaaatggatttaatcatgtcaaaacattcaccaaaattatatttattttttctgtattagtttttaatgataacgaatataaaattaccgatgccgccgtcaatttatttatccagatttaatgagaaatttataatgcgctatttcatactaatgttcactttcgtatgttcctttgttgcagcccaaccaactattgtcccacaattacagcaacaagttacggatcttacgagtagcttaaacagtcaagaaaagaaagaactgacgcacaagttagaatctattttcaataatacccaagtgcaaattgccgtattaattgttcccacaaccaaagacgagacaattgaacaatatgctacaagagtttttgacaattggcgtttaggagatgccaaacgtaatgatgggatactgatcgttgttgcctggagcgatcgcactgtccgcatccaggtaggttatgggctggaagaaaaggtaaccgatgctctggctggagatatcatccgtagcaacatgatacccgcatttaaacaacaaaaattagctaagggattagagctagctataaacgctttgaataaccaactcactagtcaacaccaatatccgactaatcctagtgaaagtgaaagtgcgtcttccagtgatcattattactttgctattttttgggtatttgcagtgatgttcttccctttctggttttttcatcaaggcagtaatttttgtcgcgcatgtaaaagtggagtctgtattagtgcaatctatcttttagatttattcctgttctccgataaaattttttccattgctgtattttccttcttttttactttcaccatatttatggtctttacctgtttatgtgtacttcagaaaagagcatctggtagaagttatcatagtgacaacagcggttccgctggaggcagtgatagcggcggatttagcggcgggggcggttcttctggaggtggcggcgcatccggccgctggtaactcaaccataaaaaatgccagcccggaggctggcatttttaaatcagataaagtcagtcttatgcctggcctttgatctctttacgaccgttgtacggtgctttttcgcccagagcttcttcgatacgaatcagctggttgtatttagcaacacggtcagaacggctcatagaaccagttttgatctggcctgcagcagtaccaacagccaggtcagcgatggtagcgtcttcagtttcgccagaacggtgagagataactgcagtgtagccagcatctttcgccatcttgattgcagccagagtttcggtcagagaaccgatctggttgaatttgatcaggatggagttagcgatacctttttcgataccttctttcaggatcttggtgttggttacgaacaggtcgtcaccaaccagctggattttgtcgcccagaactttggtctggtatgcgaaaccgtcccagtcagattcgtccagaccgtcttcgatagaaacgatcgggtactgtttggtcagttcttccaggaagtgagtgaattcttcagaggtgaacgctttgttgccttcgccagccagaacgtatttaccatctttgtagaattcagaagctgcgcagtccatcgccaaagtgatgtctttgcccagttcataaccagcagctttaacagcttcagcgataacagccagagcttcagcgttggaacccaggttcggcgcatagccaccttcgtcaccaacagcagtgttcatgcctttcgctttcagaacttttgccaggtgatggaaaacttcagaacccatgcggatggcttctttcacagttttcgcgccaaccggctgaatcatgaattcctggatatcaacgttgttgtcagcgtgctcaccaccgttgatgatgttcatcatcggaaccggcatagagtatttgcccggagtaccgttcagttcagcgatgtgctcgtacagcggcatacctttagcagctgcagcagctttggcgttagccagagatacagccaggattgcgttcgcgccgaatttggatttgttttcggtgccgtccaggtcgatcatgatcttgtcaatgccagcctgatctttagcatctttgccaatcagcgcctgagcgatcgggccgtttaccgcagcaacagctttggttacgcctttacccaggaaacgggatttgtcgccatcgcgcagttccagagcttcacgggaaccagtagaagcaccactcggagcagctgccataccgacgaaaccaccctccagatgtacttcggcttcaacagtcgggttaccacgggagtcgatgatttcacgaccgatgatttttacgattttggacattaggttttcctcaagtcactagttaaactgaaactccagacaaacaacgcgtacccagggtacgcgttgccgctctaacttttttacttacttcgcctgacgtttctggaactcgctggcggctttcacaaagcctgcaaacagcgggtgaccatcacgtggagtagaagtaaactccggatggaactggcaagccacgaaccacgggtgattcggaacttcgatgatctcgaccaactgatcatccccggaacggcccgcaacgcgcagacctgcatcttcaatctgtttcaacagcatgttgttgacttcgtaacggtgacgatgacgctcaacaattgtcggcgcattgtacagctggcgaaccaggctatcgtcaaccaactggcactgctgtgcgccgagacgcatggtaccgccgagatcgctcttctcgctacgaacttcaacgttgccgttttcatcgcgccactcggtaatcagcgccacaaccgggtacttacagtctggcacaaattccgtagagttggcgttctccatgttggcaacatggcgagcgtaatcaattaacgccacctgcatacccaggcaaatgcccagataaggaatattgttctcacgcgcaaaacgcgcggtcgtaatcatgccttctacgccacgatagccgaaaccgccaggtacgaggattgcgtccagacctttaaggatttcaacgccgcgcgtttcaacatcttgactatcgatcagtttgatgttgacgctgacacgattcttcagcccaccgtgtttcagtgcttcgatcacacttttataagcatccggcagttcaatgtacttgccgaccataccgatggtgacttcacttaccgggttcgcttcttcgaagataacctgttcccattcggacagattcgcttccgggcagtttaagctgaatcgtttacaaatataatcgtccagcccctgagatttcaacaggcccggaattttatagatggaatcgacgtctttcagagaaataaccgctttttccggaacattacagaacaatgcaatcttcgcacgttcgttcgccggaacagcgcgatcactacgacaaatcaggatgtcaggctggataccgatggagagcagctcttttacagagtgctgagtcggtttggttttgacttcaccagacgctgccatgtacggcaccagcgtcaggtgcataaacagagtgtgctcacggccaatttcaacagccatctggcgaatcgcttcgaggaacggcaaggattcgatatcacctactgtaccgccgatttctaccagtactacgtcatgaccttcgccaccttccagcacgcgctctttgattgcgttagtgatgtgcggaataacctgcacggttgcgccgaggtagtcaccgcggcgttctttacgcagaacgtcagagtagatacgacccgtggtgaagttgttgcggcggctcattttggtacgaatgaaacgctcgtagtgccccaggtccaggtcggtttcagcgccgtcttcagtaacgaacacttccccgtgttggattgggctcatagtacctggatcgacgttgatgtacggatccagtttcatgatggtcacattgaggccacgggcttcaagaatggctgcgagggaggctgcggcaatgcctttacccagagaggatacgaccccgccggtcacaaaaatatagttcgttgtcatgctgaacctgagaagttaggttgaaaagacgatggaataaccaagacgggaaagcagtatacccgaacatgacctgtgccacaaactttcattatccctcctcttcgccagcgcactattgaaatcaggagtgagaaaatagcccctttggggtaaatgtttttgacgcaaatcaagcgcttgtcatttaaaaaatgacacaaatggcgcttgaccgcgtaattcccttagagatcaatttcctgccgttttacctgttgccagacttcttccattgtttcgaggtcaacacctgtcatttccagtccacgcgcggcaacaatacgctccacttcgcgaaaacgacgctcgaatttttcgttcgctttttgcaatgcgatttctgctttcgtccctaaatggcgagccagattaaccgtggcaaacagcaggtcccccatttcctcctccagtttagcctggtcgacaacagcctgccgcgcttcgtacatcacctcgtcgatctcttcgtagactttatcgactaccggaccaagcgtcgtccaatcgaagccaacgttggcgcaacgtttctggattttttgcgcacgcattaaagccggtaaactacgaggaatatcgtccagcgcgctatgctgcgctttctgcgcgcgctcttcggttttgatttgctcccaacgggcaagcacttcactactgttttcggcagaactatcagcaaaaacatgcggatggcgacgctctaatttatcgctaatagcagcgcaaatatcattaaagtcaaagcgcccttcttcctgagccatttgcgcgtaaaacaccacctggaatagcagatcgcccagttcaccgcgaagatcgtcaaaatcttcacgggcgatggcgtccagcacttcgtaggtttcttcaagggtgtaaggcgcaatggtggcaaatgtctgctctttatcccacgggcagccgttttccggatcgcgcaggcgctgcataatagtgagcaaacggtcgatttgattcattgaattgtcctgaaaattgcgggtctgtcaggtggaaacctgtgaccagaatagaagtgagttagtaacattacccaatcagtacgttaattttggctttaatgagttgtaattcctctggggcaactgttcctttcttcgttgctcctcttgcccgccaggcgatactttttacctgatcagctaacgctacgccatcacgttcctgaccggataaaacaacttcgaacggatatcctttactttgcgttgtacaaggaacacacagacacatacctgttttgttgttgtacatgaaaggactcaggacaacagctggacgatgtccagcttgctcgctaccttttgtcgggtcaaaatcaacccaaatcagatcgcccatatcgggtacgtatcggcttaccattaccagacttccttatctttcggctctccccagtcgatattctcgtggaggttttccggcgtgatgtcgttgaccagttcagcaagcgtaaatacgggctctttacgcactggctcaataattaatttgccatccaccaggtcaatcttcacttcatcatcaatattcagattgagcgcctgcattaacgtagccgggatccgcaccgccggactatttccccaacgctttacgctactgtggatcataaccctttcctcaaaccgctatcatatgtagatacagtatatatcaatctacattgtagatacgagcaaatttcggcttaactcccgtgcaaccgacgcgcgtcgataacatccggcacctggttgagtttacccagcacgcgccccagcacttgcaggttgtaaatctcaatggtcatgtcgatggtcgccagttgctgtttggtgtcgctacggctggcaacgccaagcacgttcaccttctcgttggcgagaatggtcgtgatatcacgtaacaacccactacgatcattagctaccacgcggaccaccaggctatatccggcggagtagctctcaccccataccgcgtcaacaatgcgttctggcgcatgggagcgcagttccgccagttgttcgcaatcggcgcggtgtacactaataccgcgcccctgggtaatgaagccgacaatctcatctccaggaatcggctggcagcagcgcgcgatgtggtgcatcaggttgccaacaccttcgactaccacgcgaccgttatctttactgcggttttgcggcgtgtagcttttttgctgaagttgcttcagcgcggcggcgtcctgctcttcggcactcggcttattaaattggctttgcaggaagttcaccatctgattgagacggatatccccgccaccaatcgccgccagcaactcgtcgacatcattgaagttgtaacgcggcagcagatgtttttctgcttctttcaggctgatccccagatgttccagctcgtcgtcaaggatttgccgcccagccagaatgtttttgtcacggtcctgtttacggaaccaggcgtgaattttgctacgcccacggctggttgtgacgtaaccgaggtttgggtttaaccagtcacggctggggttcggctgtttctgggtgataatttcaatctggtcgcccatctgcagctggtaggtgaacggcacaatgcgcccgccaatttttgccccgatgcagcggtgtccgacatcactgtggatgtggtaagcgaagtccagcggcgtacttcccgcaggcaaatcaacgacatcacctttcggcgtaaagacgtacacccggtcgtcaaagacctgactacgtacttcgtcgagcatttcgccggaatcagccatctcttcctgccacgcaatcagtttacgcagccaggcaatccggtcttcatgtccgctacgtgcgccgccagcagccgcgccctctttatatttccagtgcgcagcaacacccaactctgcatcttcatgcatctgtttggtgcggatttggatctcaacggtttttccacccggccccagaaccacggtatgaatagactgataaccgtttggtttcgggttagcgacgtaatcgtcaaactcatccggcaggtggcgatagtgagtgtgcactatccccagtgcggcatagcaatcctgtaaacgctcggcgacaatacgtaccgcacgcacatcaaacagctcatcaaaggcgaggttctttttctgcattttacgccagatgctgtagatgtgtttcggacgaccatacacttccgctttaacgccttcagctttcatctcagcgcgcagatgaccaacgaactcttcgatgtagtgttcgcggtcgagacgccgttcatgcagcagtttggcaattcgtttgtattcggttggatggaggtaacggaagcagtaatcttccagttcccatttcagttgtccgattccgagacggttagccagcggtgcgtagatgttggtacactcttttgccgccagtacacgttcatcttccggcgcatcttttacttcgcgcagatgagcaatacgctccgccagtttgatgactacgcagcgaaaatcatcgaccatcgccaataacatccggcgaacgttatcgacctgttcggaggaaacagaatcagtgtgcgtcgctttcagctggcggatcgccgccatatcacgcacgccgtgaataaggttaacgacgctcttaccgacgctctcacgcagcacatcttcgctgactacgttggcatccgccagagggaaaagcagcgccgcccgcagcgtgtcaatgtccatacttaatgtgctgaggatctccaccatctcaacaccacgccacaataacagactggcatccggatgcccctgcgtctgttgcagacaatacgcccaggtttcggctaagcactcacagctcttctggctggtaatacccagacttgcgatccatttttccggatcaaattcaccagccttattgatatgtgcacttcttaccgcaaccatcgtcctctcctttagggaccagacctgccgaaatcggcaaatcgcaattatttaacgcggctgaaaagtaccatgctttccagatgtcccgtgtgtgggaacatatccagcatcgccagtcgcgcaatggtatatcctgcttttaataacgcttcgctatcccgagccagcgttgcagggttacaggatacataaactatacgaataggttccagttttataatttgctgcataacacctgcggcacctgctcgcgccgggtccagcaacactttatcgaagccgtttttcgcccacggctgctttgtgacatcttcttcaagattttcgtgataaaacgtcacattctgtaagccattaagacgcgcattctgctggcctttttccaccagcgccggaacaccttctacaccgaccacactggcagcttgtgtcgccaatggcagtgtaaagttgcccataccgcagaacagatccagtacgcgatcttcaggttgcacatccagccattccaacgcacgcgctaccattttttggttcacacccgcattgacctgaataaaatcgcgcgggctaaaagttaagcgcaacccgttactgtcataccagggcatctcaccagagacggtttcgagtatctcactatcgggggcgagatacagatccaggccttcagaatggctaaagcgttccagtttttcgcgatctgcgctacttagcggtgcggtatggcgcaaaatcatcagcgtgccgctggttgcctgtaccagttcaacatgaccaagatggcgcatagcttgtaagctgcccagacatgccctgactttgggcagcaatgcttcaagttggggcgctaaaatggggcattgtttgacgtcgacaatgtcactggagcccgctttgcgaaaccccatctgaagttgctgtgttttcggtaagtagttcagacttaaacgcgcgcgacggcgatagccccagggaacatcggcgatcacttcagagacatcgtgtttcattaatcgggcgagtgccgcacttttgcttcgctgctgtaaatccacgctggcgtgttgttgctgacagccaccgcatacgccaaaatgaggacagcgtggcgtttcgcgttccgggctatcgcttaaccggcgtacgactttagcgcgggcatactgttttttatcttcagtaacagtaacttccgcgttttcctgcggcaataatccggggataaatagcgttttgccgttatgtcgcgccacgccctgaccaaaagagtcgaggtcgttgacactaacggttatgatctgacgcgtcgtcgtgcgtcgttttgcagagtagaattgcgccattggcgagactttctcaatttaacagtgtgaccttaattgtcccataacggaactccatgaccaactacagcctgcgcgcacgcatgatgattctgatcctggcaccgaccgtccttattggtttattgctgagtatctttttcgtcgtgcatcgctataacgacttgcagcgtcaactggaagatgccggtgccagcattattgagccgcttgcagtttctactgaatatggcatgagcctgcaaaatcgcgaatctatcggtcagttaataagcgtactgcatcgtcgccattccgatattgttcgcgcgattagcgtttatgatgaaaataaccgactctttgtcacctccaattttcatcttgatcccagtagtatgcagctcggcagcaacgtgccgtttcctcgccagctcactgtcactcgtgacggcgatattatgatcctccgcacgccgattatttctgagagttactcccccgacgaaagccccagtagcgatgccaaaaatagtcaaaatatgttgggatatattgcgctggagctggatcttaaaagcgttcgcttgcagcaatataaagagatctttatttccagcgtgatgatgctgttttgtatcggtattgcgcttatttttggctggcgcttaatgcgcgatgtaaccggtccgattcgcaacatggtgaataccgtcgaccgcatccgtcgcgggcaactcgacagccgggtggaaggatttatgctcggcgagctggatatgctgaaaaacggtatcaacagcatggcaatgagcctggctgcttatcacgaagagatgcagcacaatatcgaccaggcgacgtccgatctgcgtgaaacgctggagcagatggaaattcagaacgttgagttagatctggcgaaaaagcgcgcccaggaagcggcgcgtattaaatccgagtttctggcaaatatgagtcacgagctgcgtacaccactgaatggtgttattggctttacccgcctgacgctgaaaacagaattaacaccaacgcagcgcgatcacctgaatacgattgaacgtagcgcaaataatttgctggcaattattaatgatgttctcgacttcagcaaactggaagcaggtaagctgattctggaaagtattccattcccactacgcagcacgctggatgaagtcgttactctgctggcacattcttctcacgataaagggttagaactgacgctcaatattaaaagcgacgtgcctgataacgtgatcggcgacccgctgcgattacagcaaatcatcactaacctggtggggaatgcaattaaattcaccgagaatggcaacattgatattctggtagaaaaacgtgcgctgagtaataccaaagtgcagattgaagtgcagattcgggataccggcattggtattcctgaacgcgatcaaagccgcttattccaggccttccgacaggctgatgccagtatttcccgccgtcatggtggcaccgggctggggctggtgattacacaaaaactggttaatgaaatgggcggcgatattagcttccatagccagccgaatcgcggtagtactttctggttccacattaatctcgatctgaacccgaacattattatcgaagggccatccacccagtgcctcgcaggtaagcgcctggcctatgtcgaaccaaactccgcagcagcgcaatgcacgctggatattttaagtgaaacgccgctggaagtggtttatagcccaacgttctccgcgctgcctcccgcgcattacgacatgatgttgttaggcatcgcggtgaccttccgcgagccgctaacaatgcaacatgagcgattagcgaaagcggtaagcatgaccgatttcctgatgctggcacttccttgccatgcacaagtcaatgctgaaaaactcaagcaagatggtatcggcgcgtgtctgctgaaaccattaacacctacacgcctgttgcctgccctgacggaattttgtcatcacaaacaaaacacgcttttgcctgtaaccgatgaaagtaagctggcaatgacagtcatggcggttgatgacaaccccgctaacctgaaacttatcggcgcattgctggaagatatggtgcaacatgtggaactttgcgatagcgggcatcaggcggttgaacgggcgaaacagatgccgttcgatttgatcttaatggatattcaaatgccggacatggatggcattcgggcctgcgaactcatccaccaactcccgcatcagcaacaaacgccggttatcgcggtaacggcgcatgcaatggccgggcaaaaagagaagctgcttggcgcagggatgagcgattatctggcgaaaccgattgaagaagagcgattgcataatttgttgttgcgctacaagcctggcagcggtatttcctctcgcgtcgtgacgcccgaagtcaacgaaattgtggtgaacccgaatgcgaccctcgactggcaactggcactacgccaggcagcaggaaaaaccgatttagcgcgcgatatgctgcaaatgttactcgatttcctgcctgaagttcgcaacaaagttgaggaacagctggttggagaaaacccggaaggcctggttgatttgattcataaactgcatggcagttgcggctatagcggtgtgccacgtatgaagaatctctgccaactgatcgaacaacagctacgtagcggtactaaagaagaagatttggaaccggagctgctggaactgttggacgagatggataatgtcgcgcgcgaagccagcaaaattctcgggtaatggatgtcttgtcgagtagcaatcggctttttatgacgctggtttcagattggtgacaaagtgcctgtgtttatgccggatgcggcgttaacgccttatccggcctacaaaaccaattaaattcaatgaattaaaaaatgatgtagacctgatacatagcacaacaggctattttgcgtttagcatcagtctcaaaccggctccagatagagccggttttggttttctgtcttaacgcaccatgcacgggcgcttgttatcgaacgtccagccaggaatcagatactgcattcccatcgcatcgtcacgcgcgccaagcccgtgtttctgatacagctcatgggctttcatcacttgatccatatcgatttctacacccagccccggtttttctggcacctgtaccagcccgcctttgatctcaaacggttctttggtcaggcgctgattgccttcctgccaaatccagtgcgtatcaatagcagtaattttacccggtgcagcggcggcaacatgggtaaacatcgccagggaaatatcgaagtggttgttagagtgactaccccaggtcaggccaaattcatggcacatttgcgccacacgtacgctaccttgcattgtccagaaatgcggatccgccagcgggatatcaacggattgcagggagagcgtatggcccatttgccgccagtcggtggcgatcatattggttgcagtcggtagacctgtcgcgcgacggaactctgccatcacttcacgcccggagaaaccttgctccgcaccacacggatcttctgcataagccaggctacctttcaggtatttaccgattttaatcgcttcgttcaggctccaggcaccgttaggatcgagcgtaatacgcgcctgcgggaagcgttgcgccagtgccacaatagactcggcctcttcttccccggccagtacaccgcccttcagtttgaaatcgttgaagccatatttttcatatgccgcttccgccaggcgcaccaccgcatccggcgtcatcgcttcttcatgacgcaggcgataccagtcgcaactgtcatccggctggctttgatacggcagcggcgtggctttgcgattaccgacgaagaacagataaccgagcatttcgacttcgctacgctgttgaccatcgcccagcaggcttgccacgtttacccccagatgctgccccagcagatccagcattgccgcttctatcccggtaactacatgaatagtggtacgtaggtcaaatgtctgcaaaccgcgcccaccagcatcacgatcggcaaaagtattacgcaccagcgtcagaacgtttttgtattcacccagcgttttacctaccaccagcggaatcgcatcttccagcgttttacggattttctcgccgccgggaatttcccctacgccagtgtgaccagaattatctttgataatcacaatattacgcgtaaagaacggtgcgtgtgcaccactcagattcatcagcatactgtcatgacccgccaccgggataacctgcatttcagtaacaacaggcgtcgtaaattgagaactcatatttatgtcctttttcagaatcaatgacggccgaaaacgggacgtttacggtcaaaggtccagccggggatcaggtactgcatcggacctgcgtcgttacgcgcaccgccaggcagacgtttataggcctcatgtgccttttgtacctgttcccagtccagttccacgcccagaccgggcgcatcaggaacggcaatttttccgtttttaatctccagcggattttgggtcaggcgacaatcgccctcctgccaaatccagtgggtatcgatagcggtaggattacccggtgccgccgcgcccacatgggtaaacatcgccagagagatatcgaaatggttattagaatggcagccccaggtcagcccccagtcgtcgcaaagctgcgccacacggactgcaccggaaagcgtccagaagtgcggatcggcaagtggaatatctaccgcattgagcatcaccgcatgacccatttcgcgccagttggtggcgatcatgttagtcgcgacgggcaagccggtcgcccgtcgaaattccgccatcacttcacgtccggagaagccctgttctgcgccgcatggatcttcggcataggtaagaacatcattcagccctttgcataaagaaatggcttcatcaagcagccatgcaccgttgggatcaacggtaatccgcgcatccgggaagcgtttcttcaatgcacgaacagtgtcgatttcttgctcgccaggtaacacgccgcccttaagtttgaaatctttaaagccgtagcgatcctgactggcttccgccagacgcacaacggcttcgctgttcattgctttctgatgccgcaactgataccactcatggttgcccggcgtattttccacataaggaagatcggttttggtccgatcaccgatataaaacagataaccgaggacggtaatagcctcgcgttgcttgcctggccctaacagttcgcagaccggaacattcagcgccttacctagcaggtcaagcaaagcggcttccagcgccgccacggcgttaacgcgtaattcaaaggtccaggcacctttaccgaaggtatcaaaatcggcggcctgattacctttatgcacctgctggaccactttattcagtcgcgcaacttcctggcccagaaccatcggaatagcatcgacaagcgtctgataaatcacatctccgcccggcgcttcaccaatgccggtatgcccggcgttatcggtgagtaccacaatattgcgggtgaaatatgcgttatgtgccccaccaatattaagcaacatgctgtcatgcccggccaccggaatgactttcatatcagtaataacaggactggattgtgtcgccatcttattgccccgcaacaggtttcaactcgatacgcttgatatcgcccaccagcaccaggtagctcagtaccgcgattaaggcatgaacaccaacataaatcagcgccccattaaagctgccagtcgtgccaacgatataaccaattgcgattggcgtgacgatgccagaaatgttaccgaacatgttgaacaggccaccggaaagaccgctgatctcttttggcgcggtatctgccattactgcccaacccagcgccccgatgcccttaccgaagaaggccagcgccataaagccgatgatcatccactcaacgttgacgtagttgcagaacaccatcaccatgctcagcaacatgcccattacgatcggtgttttacgcgcaatgttcaggcttcccgtgcggcgcatcagccagtcggaaataatcccacccagcacaccgccgataaaaccgcaaaccgccggaacggaagccacaaagcccgctttcagaatgctcatcccgcgtgcctgcaccagataaaccgggaaccaggtaataaagaagtaagtcagggcgttgatacagtactgaccgatataaacgccgatcatcatccgactccctagcagctgtttgatctgcccccacttcacgctgaacggcactttaactttggtgttttgctgatccatattgatcagcgcaccacccgcggcgatgtactccagctctttcttatttacccccggatgttgatttggctcgtggatgactttcaaccagataaagctgatgacaatccccagaccgcccataaagaagaagacgtgactccagcccacttcatgcgtcagccagcccataatcggcgcgaagatcaccgttgcgaagtattgagcggagttaaaaatgctcaccgccgttcccctttcctgcgccggaaaccaggccgcaacaatgcgactgttgccggggaaagatggcgcttcagcaagcccgaccaggaagcgcagcgtaaacagggcaacgataatgccgaatccactaaagatatcgacgaagccttgcagcaaggtaaacatgctccagataaagatgctccagaagtagacgcgtttactaccaaaacggtccagcaaccagccaccagggatctgcccgataacataagcccaactgaaagcagagaacacatagcccattcccacgggatcaaggccgatatctttggccatttcgctaccggcgatagagagcgtagcgcggtcgccgtagttgaaggatgtgacgataaacaacatcaccactatccagtaacgagcatttgtgcgtttttccacactgctcgcagcctgacttaaagaactcattgttgcactcctgaaaattcgcgttagccacgctcactctggactgcgacatcgccaggaaatcagaggtgacgtagggtgttttttgccgtttttataggtcgttcgccgaatacggcgcgtgtttatatctggcaatagcagtataaaaagcgcgccatagcggctcaccgtgcaacaacacaacattaatgcgttcaatgaggcccgattttggcattagccctggacggtggaatccacttcacggaaatgaaaacaagaacaagaaaggaagggttaaaacgaagaaataaagaagagtatgaaatggatcgcttgactccaggcaaacgccagtaaaaatccgcgctatgaagcagtttttactggcatttgcctgaaaagattcgattcagcaccgctaaaacgacatttaccgctcgctgaacatatcaggacaacagcgtgccccactgttcgacccacggattactttccgtttccggttccgggttctcactggcgtcaatcaacagcatttcgccaacccgctgagcgctctgttcctgcaacaaggcatcgaactgtttgccgccattgcagaaattcacataactactgtcgccgagcgcaatcacgccataacgcagattcggctggaagcccagactatctttgattccctgaaagagtggcacaatgctatcaggaaggtcgccctgcccggtcgtggacgtaaccaccagaacatacttatcctgatagggcagccagtcgcttaattcaggatcttcaaataccgttgctttgtggccctgcgcggtcagaatcgcttccgcttcttcggccactaacagactattcccgtacatggtgccgacaaaaataccaatttccgccataccgttttctccctggattaggaacttatctctccatcctgaccgcttggcgcactgaactcaaccctttcattttcaggaagcagaccgcgccagccaaattgacttaacgcctgcatccaggtgtcgtccaggcccgcgtgaatagtcagcggctcgccagtaaaaggatgcgtcaaactcaactgactggcatgtagcattaaccgctggaggccaaaatgctcagcaccgctgcgattctggcgtaaatcgccatgtttgctatcgccaataatcggatgacgcaaatgggcaagatgtcggcgaagctgatgtttgcgtccggttttcggctccagttccaccaggccgtagcgcgtggtcgggtaacgtccggtcgctaccggcatttctacggtcgccagaccgcgataatgcgtcactgctggctgcgggcctttatcttcgcgggcaaatttatcagcgattttgtccagttcttccaccagtggataatccagcaccgcttcttccatcaaccagccgcgcacaatcgcatggtaacgtttctggatttggtgctgttcaaactgttgtgccagcagccgtccggcctcgctggataatcccatcaacaacacaccagaagtgggtcggtccagacgatgagcagtaaaaacatgctggcctatctggtcacgcacggtttgcatgaccactactttctcgtcgcgatccagccagctgcggtgaaccagccagccggagggtttatttaccgcaaccagccattcatcctgatagagtatttccagcattagctcgcatcatccgcaaaaagagcatccagtttttccagctcagccagaataagcgcgcgttgcggatggtccgtcgccagcgccatttcataatagggtgcaacggcaaaagcgcccggtaacggctgtttgttatctaacaaatcgtgcattcgcgggatcagcacccactgcaaccactccagtggttccatggtgtccataaagaacggttgggtactattaaattgatgcggctggggttcatcgtttcgccagtgctgatgttcacgcagtaacgcttcaagcgcctgcaactggagacgaacgcggtcatgagtggtcataaagcaacctcaataagaaaaactgccgcgaaggatagcaggaataaaaaaagggagcactgtattcacagcgctcccggttcgtttcgcagcattccagctacttttgttgctccctgctcatccttgacaacttttcctctggccttgcggccaatcgttcatcctgaactattgcttcctgctcacaccaccccgatgtgatacttcatcctgaagtgtccctggccttcctgacccaccgaatcatcctgaccggttctcattctccatcctggaggtgtcctttaacgcgtcctgcgtcatcctcttcgcttcatccagaagcctttccctgaaacaccatcctggtgtgtcctgcagaagtgtcatcatcctgatgttcacttcgttgtctgactccctgtcgacgaagatagaatcgtctttttcgcgaagtcttacaaggcgcttacagacaatgccttaaggaaaatttcatatgaaagttaagaattaacaatcaacattttgattttaaatgaaaataacgattcttatctttttaagtattcgcttatttcctggcgatctcctacagagtctgtaagagatctctcacaaccagatggggtatttggattacagaagaggcttaagttgattaaggaattccgcaagattactggctaaatgcgtccgtttacgtgttcccagcgtctctttgcacacttcaccggagagattacacacgctgatgacctctaactcttcttccagcgtcgcgataaatagtgtgggcggcagttttagccttttctgagtcaccagatgaccaatcagattttcctgcacccgacggaagtcgtcttcactccaggtttgcagcaatgtcagtttgatatcgccaaactgcgcgtgcatatccccggcaaactgagtcgtataaaaggtatgaattgtgggttgtatcacaatatcaaaagcgcgttcaaccgcgtttacattttgttccccggtaaacggctggggttgccagtatacggcatcttcggtagtactaataatgcacggactaggaacaccgtacagttcctcacttaacggccagcttttatgctcttcatgccacgcatcgcagtagcgtgcagtaaaatctttcagggcttgtgcggtcaaatcgtccactaatttctctcttcacttaaaccagatacacttgtcgtttagtttatctggtttatgacggtgaaacatgtcttcttatgcaaaccatcaggcacttgcgggcctgactcttggaaaaagtaccgattaccgggatacctatgacgccagcctactgcaaggcgttccacgcagcctgaatcgcgacccgctgggtctgaaagcggataacctgccttttcacggtacggatatctggacgctgtatgaactttcctggctgaatgcgaaaggtttgccgcaggtcgctgtcggtcatgttgaacttgattacaccagcgtaaatctgattgagagcaagagttttaagctctatctcaacagttttaaccagacgcgttttaataactgggatgaggtgcgccagacgctggagcgcgacttaagcacttgcgctcagggtaagattagcgtggcgttatatcgtcttgatgaactggaaggccagccgataggtcattttaatggcacttgcattgatgaccaggatatcactatcgataactatgaattcactactgactatctggagaatgccacctgtggtgaaaaagtagtggaagagacgcttgtcagccacctgctgaaaagtaactgcctgatcacccatcaaccagattggggtagcctccaaattcagtatcgtggacgccaaattgacagagaaaaactgctgcgttacctggtcagtttccgtcatcacaacgagttccacgaacagtgcgtggaacgcatctttaatgacctgttacgcttctgccagccagaaaaattgagcgtttacgcacgttatacccgtcgtggcggtctggacattaacccgtggcgcagtaatagcgattttgtcccaagcaccacaagactggttcggcaataaatttttctcaattttgcgtgctggattcacgcagaaggttgtgaaaggtcatcaggcagggctattgtaatcaaagggaatgacgatattcgtcccataaggagtttttcttgattacacatattagcccgcttggctccatggatatgttgagccagctggaagtggatatgcttaaacgcaccgccagcagcgacctctatcaactgtttcgcaactgtagtcttgccgtactgaactccggtagtttgaccgataacagcaaagaattgctgtctcgttttgaaaatttcgatattaacgtcttgcgccgtgaacgcggcgtaaagctggaactgattaatcccccggaagaggcttttgtcgatgggcgaattattcgcgctttgcaggccaacttgttcgcggtcctgcgtgacattctcttcgtttacgggcaaatccataacaccgttcgttttcccaacctgaatctcgacaactccgtccacatcactaacctggtcttttccatcttgcgtaacgctcgcgcgctgcatgtgggtgaagcgccaaatatggtggtctgctggggcggtcacagtattaacgaaaacgagtatttgtatgcccgtcgcgtcggaaaccagctgggcctgcgtgagctgaatatctgcaccggctgtggtccgggagcgatggaagcgccgatgaaaggtgctgcggtcggacacgcgcagcagcgttacaaagacagtcgttttattggtatgacagagccgagcattatcgccgctgaaccgcctaacccgctggtcaacgaattgatcatcatgccagatatcgaaaaacgtctggaagcgtttgtccgtatcgctcacggtatcattatcttccctggcggtgtgggtacggcagaagagttgctctatttgctgggaattttaatgaacccggccaacaaagatcaggttttaccattgatcctcaccggcccgaaagagagcgccgactacttccgcgtactggacgagtttgtcgtgcatacgctgggtgaaaacgcgcgccgccattaccgcatcatcattgatgacgccgctgaagtcgctcgtcagatgaaaaaaagcatgccgctggtgaaagaaaatcgccgtgatacaggcgatgcctacagctttaactggagtatgcgcattgcgccagatttgcaaatgccgtttgagccgtctcacgagaatatggctaatctgaagctttacccggatcaacctgttgaagtgctggctgccgacctgcgccgtgcgttctccggtattgtggcgggtaacgtaaaagaagtcggtattcgcgccattgaagagtttggtccttacaaaatcaacggcgataaagagattatgcgtcgtatggacgacctgctacagggttttgttgcccagcatcgtatgaagttgccaggcagtgcctacatcccttgctacgaaatctgcacgtaatctccgctcccccggtgacgtttgttgccgggttttctcgtttttggtcacttactcatcaactcatttcatttgttatatgaatgtttcttaccaccctcacgcgacaaatatcatcacagttaatatgtcatacaatttatgttgcaacgcaaacgtttccctattttcataaaccgtattttatcgctatgaaaaagaaattatcgccatgattaactaaaagtattgattttttcagttcaacctacatatattgcgcgccccggaagaagtcagatgtcgtttaatgggcaaatattgcccttaaattctcttttacttttgatttacagagtaaagcgttgggataatctatcttccaagtagattattgtatttgagatcaagatcactgatagatacataacttgtgtgtatctttccgccctcaaattattacggcggtaaatgattaagccatcgccgatagacagatttcatttttacggtcaggcaccttcccgggctgaactggctaaaagctgaattatttgcattcctccaggagaaatagatggaaacgactcaaaccagcacgattgcgagcaaagactctcgtagtgcctggcgcaagacagacaccatgtggatgctgggcctttacggcacggcaatcggcgcgggcgtgctgttcctgccaatcaacgccggtgttggcggtatgatcccgctgatcatcatggctatccttgcgttcccgatgacgttttttgctcaccgcggcctgactcgcttcgtactgtctggtaaaaacccgggcgaagacatcaccgaggttgtagaagaacactttggtattggcgcaggtaaactgattaccctgctctacttcttcgctatctacccgatcctgctggtttatagcgtggcaatcaccaataccgttgaaagcttcatgtctcaccagctgggtatgacgccaccgccgcgtgcgattctgagcctgatcctgatcgtgggtatgatgaccatcgttcgcttcggtgagcagatgatcgttaaagcgatgagtattctggtattcccgtttgttggcgtactgatgctgctggctctgtacctgatcccgcagtggaacggcgctgcactggaaacgctgtctctggacactgcatctgcaaccggaaacggtctgtggatgaccctgtggctggcaattccggtaatggtgttcagcttcaaccactctccgatcatctcttctttcgccgttgcgaagcgtgaagagtacggcgatatggcagaacagaaatgcagcaagatcctggcattcgcacacatcatgatggtgctgaccgtaatgttcttcgtcttcagctgtgtactgagcctgactccggcagacctggctgcggctaaagagcagaacatcagcattctgtcttacctggctaaccactttaacgcaccggttatcgcgtggatggctccgattatcgcgattatcgctatcaccaaatccttcctcggtcactacctgggcgcacgtgaaggcttcaacggtatggtgattaaatctctgcgtggtaaaggtaagtctatcgaaatcaacaagctgaaccgtatcactgcgctgttcatgctggtaacgacctggattgttgccaccctgaacccgagcatcctgggtatgattgaaaccctgggcggtccaatcatcgcgatgatcctgttcctgatgccgatgtacgcaattcagaaagtaccggcaatgcgtaagtacagcggtcacatcagcaacgtattcgttgtcgtgatgggtctgattgcaatctccgcaatcttctactctctgttcagctaagtcctttcgcgccgctttcgggcggcgcttcctccgttttaacgcgatgtatttcctatgattagcgtattcgatattttcaaaatcggcattggcccttccagttctcataccgttggaccaatgaaagcgggtaaacaatttaccgacgatctgattgcccgtaacctgcttaaagacgtgacccgcgtggtggttgacgtgtacggcagcctctctctgaccggtaaaggccaccacactgatatcgccattattatgggcctggcgggtaacctgccggataccgtggatatcgattccatccccagttttattcaggatgtgaatactcatggtcgcctgatgctggcaaacggtcagcatgaagtggagttcccggttgatcagtgcatgaacttccacgccgacaacctttctctgcatgaaaacggtatgcgcattaccgcgctggcgggcgataaagtcgtttacagccagacttactactctattggcggtggctttatcgttgatgaagagcattttggccagcaggatagcgcaccggttgaagttccttatccgtacagtagtgcagccgatctgcaaaaacattgtcaggaaaccgggctgagtctctctggcctgatgatgaaaaacgagctggcgctgcacagcaaagaagagctggaacagcacctggcgaacgtctgggaagtcatgcgcggcggtattgagcgcggtatttccaccgaaggcgtgttgcctggcaaactgcgcgttccacgccgtgctgcggcactacgccggatgctggtcagccaggataaaaccaccactgacccgatggcggttgttgactggatcaacatgtttgcactggcagtgaacgaagagaacgctgctggcggtcgcgtggtgactgcgccgactaacggtgcgtgcgggattatcccggcagttctggcgtactacgacaagtttatccgcgaagtgaacgctaacagtctggctcgttacctgctggtagccagcgccattggttctctttataagatgaacgcgagcatttctggtgctgaagtgggttgccagggtgaagttggcgtggcgtgcagtatggcggcggctggtctggcagaactattaggcgcaagcccggcgcaggtgtgcatcgcggcggaaatcgccatggagcacaacctcggtctgacgtgtgacccggtcgccggacaggtacaggtgccatgcatcgagcgtaacgccattgcggcagtaaaagcggtgaacgccgcacgtatggcgctgcgccgtaccagcgagccgcgcgtctgcctcgataaagttatcgaaaccatgtacgaaacaggtaaagatatgaacgccaagtaccgcgaaacctctcgcggcggcctggcaatgaagatcgttgcctgcgattaatcgctctccaaaggcctcgttttgcgaggcctcttcccgatttctcatccagccgtagcctgttccggcatcgaatgttacccttatcgcctgatctttaagggggttatcgtggctgttcatttgcttattgtcgatgcactgaatcttattcgtcgcattcatgccgttcaggggagcccctgtgtcgaaacctgccagcatgcgctcgatcagctcattatgcacagccagccaacccacgcggtcgccgtttttgatgatgaaaaccgcagtagcggctggcgtcatcagcgtttaccagattacaaagcgggtcgaccgccaatgccggaagagttgcacgacgagatgcctgcattacgcgccgcctttgagcaacgcggcgtcccgtgctggagtaccagcggcaacgaagccgatgacttagccgccacgctggcggtcaaagtgacacaggccgggcatcaggcaacgattgttagcacagataaaggctactgtcagttacttagtccgacattacgtattcgtgattacttccagaaacgttggctggatgcgccatttatcgataaagaatttggcgttcaaccgcagcagttgcccgattactggggacttgcggggatcagcagtagtaaggtaccgggtgttgcgggaatcggaccaaaaagcgccacgcagctgctggtcgagtttcagagtctggaagggatatatgagaatctggatgcggttgccgaaaagtggcgcaaaaaattagaaacccataaagagatggcgtttctgtgccgcgatattgcccgcttacaaaccgatttgcatatcgacggcaatttacagcaattgcggttggtacggtaacggcgagccggatacgccgcaaacgtcgtatccggcattatcacatcagcgcatttaccaggcggtatggtaaagctctacaatatcctcaagcgttgcttcacgcgggttgccaccggtacaaacatcatccagtgccgcctgcgccagtgccggaatgtcttccttgcgtacaccaacatcacgcaaatgtggcggaataccgacatcacggttgagagcaaacaccgcttcaacagcggcattacgcgcctcttccaggctcataccttccactttcacgcccataacgcgcgcgatatcgcggtacttctcaccggtaaagtcagcgttataacgcatgacatgcggtaacaggatggcgttcgcaacaccgtgtggagtgttataaaacgcgcccagtggatgcgccataccatgcaccaaccctaacccaacattgctgaagcccatacccgcaacatactgcccgagcgccatttcttctccggcatccttatcaccagcaacgcttcctcgcagcgccccagcaatgatttcaatcgctttaatgtgcagtgcatcggttagcgcccacgcgccacgggtaatatacccctcaatagcatgagtgagcgcatcgacacccgtcgcagctttcagcgctggaggcataccatccatcatgtcagcgtcaataaacgccacctgcgggatatcatgcggatcaacgcaaacaaacttgcgccgtttctcttcgtcagtgatcacgtagttaatggtcacttctgccgcagtacctgctgtggtaggaattgccagaatcggtacactgggtttattggtcggggaaagcccttccaggctacgcacatcggcaaactccgggttgttgctgataatgccaatcgctttacaagtatcctgtggagaaccaccaccaatagcgatcaggtaatccgcgccgctattctggaatacaccgagcccttctttgacgacagtaattgttgggttgggcactacgccgtcgtaaatcgcccatgccagccctgcagcatccatcttatcggtcactttcgccaccacgccgcattgcaccagcgttttatcggtgacgatcagcgccttctgataaccacggcgtttcacctcatcggttaaagccccaacagcaccccgaccaaaccatgccgtttcgttcagaatcattctgttagccatcatccttctccttgttgctttacgaaattactcttcaattcgtaacccataggttttgaatttctccagcactacggcaatctcttcatcgctcagcactggcaccgggtccgtaatcgccagggtcgtcaggtaaagttgcgccagcacttcaacttcatgcgccagccataacgctttttccagattcacctcacaagcgataagcccatgatgttgtaacaaagttgccttacgatttttgagagccagcgcaacatgttcagaaagttcgcgtgttccaaaggtcgcataaggcgcgcaaggaatagaattaccgccagccgccgcaatcatgtagtgaatagcggggatgcttcggttaagaatggaaactgccgtgcaatgaacggcatgattgtgaacaaccgcgttggcatccggtctgctttgataggctgccatatggaaacgccattcgctactggggagctttccttcctcatgtttaccgttgccatcaataaagacaatatggctctccgtcagtttttcatatggaatgcctgtaggcgtaatcagcatcccatcctgataacgtacactgacgttccccgctgtcccctggttcagtcccaggcgggtcatttccaggcaagtgtcaataatctgacgagcaagtttatttcgttccattagctacctctctctgattcaaaacagggcaataatgttgttcctttcacactattgaattagccgtttaattacccaccatcttcttcctgattaacaagaaagaaattcacaagcttatattttgtgacctggttcaactaatcacagtaaataactgcaagttctctttttataaccccattaaaaatgaccgctcttaaaaatatttatcaaaacggtcatttttctattcctccaagcccggaatgaccgttttcggcacaaacaattaatacggtcatctgatttgtgttttttatgatttattttctgaaacgggcatgaaatttcgattattaaagtgatggtagtcacataaagtcaccttctagctaataagtgtgaccgccgtcatattacagagcgttttttatttgaaaatgaatccatgagttcatttcagacaggcaaatattcactgatatgaagcccgaactcgctggttttgcacttttgaaaacataaccgattacgtgcttaagcttctgaacctaagaggatgctatgggaaacacaagtatacaaacgcagagttaccgtgcggtagataaagatgcagggcaaagcagaagttacattattccattcgcgctgctgtgcagtctgttttttctttgggcggtagccaataaccttaacgacattttattacctcaattccagcaggcttttacgctgacaaatttccaggctggcctgatccaaagcgccttttactttggttatttcattatcccaatccctgctgggatattgatgaaaaaactcagttataaagcagggattattaccgggttatttttatatgccttgggtgctgcattattctggcccgccgcagaaataatgaactacaccttgtttttagttggcctatttattattgcagccggattaggttgtctggaaactgccgcaaacccttttgttacggtattagggccggaaagtagtggtcacttccgcttaaatcttgcgcaaacatttaacagctttggcgcaattatcgcggttgtctttgggcaaagtcttattttgtctaacgtgccacatcaaagccaagacattctcgataaaatgtctccagagcaattgagtgcgtataaacacagcctggtattaagcgtacagacaccttatatgatcatcgtggctatcgtgttactggtcgccctgctgatcatgctgacgaaattcccggcattgcagagtgataatcacagtgacgccaaacaaggaagcttctccgcaagcctttctcgcctggcgcgtattcgccactggcgctgggcggtattagcgcaattctgctatgtcggcgcacaaacggcctgctggagctatttgattcgctacgctgtagaagaaattccaggtatgactgcaggctttgccgctaactatttaaccggaaccatggtgtgcttctttattggtcgtttcaccggtacctggctcatcagtcgcttcgcaccacacaaagtcctggccgcctacgcattaatcgctatggcactgtgcctgatcagtgccttcgctggcggtcatgtgggcttaatagccctgactttatgcagcgcctttatgagcattcagtacccaacaatcttcagcctgggcattaagaatctcggccaggacaccaaatatggtagctccttcatcgttatgaccattattggcggcggtattgtcactccggtcatgggttttgtcagtgacgcggcgggcaacatccccactgctgaactgatccccgcactctgcttcgcggtcatctttatctttgcccgtttccgttctcaaacggcaactaactgaacatattttccgaataaagtgaggaatctgtaatgaaaaaaatcagcttaccgaaaattggtatccgcccggttattgacggtcgtcgcatgggtgttcgtgagagccttgaagaacaaacaatgaatatggcgaaagctacggccgcactgctgaccgagaaactgcgccatgcctgcggagctgccgtcgagtgtgtcatttccgatacctgtatcgcgggtatggctgaagccgctgcttgcgaagaaaaattcagcagtcagaatgtaggcctcaccattacggtaacgccttgctggtgctatggcagtgaaaccatcgacatggatccaacccgcccgaaggccatttggggctttaacggcactgaacgccccggcgctgtttacctggcagcggctctggcagctcacagccagaaaggcatcccagcattctccatttacggtcatgacgttcaggatgccgatgacacaagcattcctgccgatgttgaagaaaaactgctgcgctttgcccgcgccggtttggccgtcgccagcatgaaaggtaaaagctatctgagcctgggcggcgttagcatgggtatcgccggttccattgttgatcacaacttctttgaatcctggctgggaatgaaagtccaggcggtggatatgaccgaactgcgtcgccgtatcgatcagaagatttacgacgaagccgaattggaaatggcactggcctgggctgataaaaacttccgctatggcgaagatgaaaataacaaacagtatcaacgtaatgccgagcaaagccgcgcagttctgcgcgaaagtttactgatggcgatgtgtatccgcgacatgatgcaaggcaacagcaaactggccgatattggtcgcgtggaagaaagtcttggctacaacgccatcgctgcgggcttccaggggcaacgtcactggaccgatcaatatcccaatggtgacaccgccgaagcgatcctcaacagtagttttgactggaatggcgtgcgcgaaccctttgtcgtggcgaccgaaaacgacagtcttaacggcgtggcaatgctaatgggtcaccagctcaccggcaccgctcaggtatttgccgatgtgcgtacctactggagtccagaagcaattgagcgtgtaacggggcataaactggatggactggcagaacacggcatcatccatttgatcaactccggttctgctgcgctggacggttcctgtaaacaacgcgacagcgaaggtaacccgacgatgaagccacactgggaaatctctcagcaagaggctgacgcttgcctcgccgctaccgaatggtgcccggcgatccacgaatacttccgtggcggcggttactcttcccgcttccttaccgaaggcggcgtcccgttcaccatgactcgtgtcaacatcatcaaaggcctgggaccggtactgcaaatcgcggaaggctggagcgtggaattgccgaaggatgtgcatgacatcctcaacaaacgcaccaacagtacctggccaaccacctggtttgcaccgcgcctcaccggtaaagggccgtttacggatgtgtacagcgtaatggcgaactggggcgctaaccatggggttctgaccatcggccacgttggcgcagactttatcactctcgcctccatgctgcgtatcccggtatgtatgcacaacgttgaagagaccaaagtgtatcgtccttctgcctgggctgcgcacggcatggatattgaaggccaggattaccgcgcttgccagaactacggtccgttgtacaagcgttaatacattactccctgatgtgatgcccggtcgctccggctaccgggcctgaacaagcaagagtggttagccggataagcaatgttatccggctatattgcaggagcgattatgaaacaagaagttatcctggtactcgactgtggcgcgaccaatgtcagggccatcgcggttaatcggcagggcaaaattgttgcccgcgccagtacgcctaatgccagcgatatcgcgatggaaaacaacacctggcaccagtggtctttagacgccattttgcaacgctttgctgattgctgtcggcaaatcaatagtgaactgactgaatgccacatccgcggtatcgccgtcaccacctttggtgtggatggcgctctggtagataagcaaggcaatctgctctatccgattattagctggaaatgtccgcgaacagcagcggttatggacaatattgaacggttaatctccgcacagcggttgcaggctatttctggcgtcggagcctttagtttcaatacgttatataagttggtgtggttgaaagaaaatcatccacaactgctggaacgcgcgcacgcctggctctttattagcagcctgattaaccaccgtttaaccggcgaattcactactgatatcacgatggccggaaccagccagatgctggatatccagcaacgcgatttcagtccgcaaattttacaagccaccggtattccacgccgactcttccctcgtctggtggaagcgggtgaacagattggtacgctacagaacagcgccgcagcaatgctcggcttacccgttggcataccggtgatttccgcaggtcacgatacccagttcgccctttttggcgctggtgctgaacaaaatgaacccgtgctctcttccggtacatgggaaattttaatggttcgcagcgcccaggttgatactagcctgttaagtcagtacgccggttccacctgcgaactggatagccaggcagggttgtataacccaggtatgcaatggctggcatccggcgtgctggaatgggtgagaaaactgttctggacggctgaaacaccctggcaaatgttgattgaagaagctcgtctgatcgcgcctggcgcggatggcgtaaaaatgcagtgtgatttattgagctgtcagaacgctggctggcaaggagtgacgcttaataccacgcgggggcatttctatcgcgcggcgctggaagggttaactgcgcaattacagcgcaatctacagatgctggaaaaaatcgggcactttaaggcctctgaattattgttagtcggtggaggaagtcgcaacacattgtggaatcagattaaagccaatatgcttgatattccggtaaaagttctcgacgacgccgaaacgaccgtcgcaggagctgcgctgttcggttggtatggcgtaggggaatttaacagcccggaagaagcccgcgcacagattcattatcagtaccgttatttctacccgcaaactgaacctgaatttatagaggaagtgtgaaatgctgaaaacaattagcccgttaatttctcccgaactattgaaagtgctggcagagatgggacatggagatgaaattattttttccgatgctcactttcccgcccatagcatgggaccgcaggtgatccgcgctgatggcctgttggtgagcgacttgctccaggcgattatcccgttatttgaactggacagttatgcaccgccgctggtgatgatggcggcggtagaaggtgacactctcgatcctgaagtagaacgacgttaccgtaatgcgcttagtctacaagccccgtgtcctgacatcatccgcatcaatcgttttgcgttttatgaacgggcgcaaaaagcctttgcgatcgttatcacaggcgaacgagcgaagtacgggaatattcttttaaaaaaaggggtaacaccgtaatctcataccggtacgcccgcatgacgcgggcggttatcgaatgatggggtgaaaaatatgaaagcggcacgccagcaagcgatagtcgacctgctgctgaaccataccagcctgaccacggaagctctctctgaacagctaaaggtcagtaaagaaaccattcgtcgcgatctcaatgaattacagacgcagggtaaaattctgcgcaatcatggacgcgctaaatatatccaccgtcaaaatcaagacagtggcgatccctttcacatcaggctgaaaagccattatgcgcataaagcagatatcgcgcgcgaggcgctcgcgtggattgaagaagggatggtgatagccttagacgccagtagtacttgctggtatctggcacgccagttgcctgacatcaacattcaggtcttcaccaatagccatccgatttgccatgaactcggtaaacgcgaacgcattcaactgatcagttccggcggcacacttgagcgcaaatatggctgttacgtcaatcccagcctgatttcccaacttaaaagcctggaaatcgatctgtttattttttcttgtgaagggatcgatagcagcggcgcactgtgggactccaatgcgatcaacgctgattacaaaagcatgctattaaaacgtgccgcgcaaagcttgttattgattgataaaagtaaatttaatcgtagtggggaagcccgcatcgggcatctggatgaggtaacgcacattatttctgatgagcgccaggttgcaacttctttggtaacagcctgacggaaagggtagcaggccggagacgacgccccggccttgcctgttatcgctcgtcgcgacgaccacccaccgcagcccagatgcggcggacgtgcaccgtcacttcttcgcgatcgtgatacaactgccgcgcctgaatctgagcatttatgccatgttcatcaagctgtgcctgaatatacgccagattgtgactcacttcttcgtagcgttttttcatcggcagtttgaggttgaaaatggtttcacggcaccagccattaaccagccactgtgccatcaatgccgcaactttcgccggtttttcaaccatatcgcataccatccaggagatattgctgcgcgtcggacggaatttgaaaccgtcttcccgcagccacgtcacctgtccggtatccatcagactttgcgccatcgggccgttgtcgacggaataaacccacatgttgcgcttcaccagttggtaggtccagccgccagggcaagcgcctaaatccaccgcccacatcccgttcgccaggcgttcatcccactcatccgcaggaataaacacatgaaatgcctcttccagtttgagcgtggaacgactcggcgcatctgccggaaatttcaggcgcggaatgcccatatagaacgggctattattgttgctgtaactgtaaccggtatagcagcagcctggtgcaataaagaatacatgcacaaccggacgcttcggcgtttcatagttcgccagcaccccggcatcgcgcaaggcagcgcgtagcggaacagtaaatttacggcagaatttcagtaactctttgctttcgttggtatcggcaacttcaacacgcagttcaccgcccttctctactacgccctgtaacatgccgacaatgggggtaatacgatcttctggcggcaaatgctgcaggagttcccccaccacaaaccactggcgggcaaaaattaaactactgaacggcagctcacggattaacttatcgccatcatcaggttgataacattcataaatgacataacccgcattctctttcacgcgggcaaaaccgaaaatttcccgctggccggctttatcggtaatttctgcggcgcactctttttcaaagcccggacggcacagcaatacaaccttattcatgacttacgcccttgcgctttaaacggatagcaccaactaacattaacgcccagcccgcgaggaagctcacgccgccaaccggagtgacaaacgcccacaaacgcagatgggacagcgccaggcaataaaggctgccgctgaacaacaccgtgcctaacgcgaggaaaacgctactccagtaaaaccagatactgatgcgacgctgcattgccaccgccagacctaagatcgccagcgtatgaaacgcctggtattcgaggccggtctggatccagcccatctcaacggcccccatggttttacttaacacatgcgcgccaaaagcgcccagagccacaaaaatgaagccgctaatggcggcgaaaatcagcataaaacggctggtcatggtcgtaccctacgtaaattattgttcataacgaaagcggaatttttcttgttcagcagcggctttcgccaggatccattggcgaaaggcggctattttacccagttctgcctgactgtcatgacaaaccagataaaaagcatttttactgaccagaacatcattaaacgggcaaacaagacgtccggcctcgatttcagattgcgccatcacgttatttgccagcgccactccctgcccgtggatagccgcttgcagcaccatggcgctatggctaaaaattggcccttgctgaacgttgatatgatttaaccccaactgtcgggtatatgtctgccagtcacggcggctagcatcatgtaataacgtatgtttagccagatcttccggtgtcttcaagggtttttcgccagtcagcagtagcgggctacacaccggcaataaatattcggcgtacagtttttccacccgtagccccggccagttgccccgaccataaaatatcgccacatcaacatcatccgccagcttatcttcctgacgatcaaccgcctggattcgaacgtcaattcccggataagcactattaaagctggaaagtcgcggaaccaaccaatgaatggcgaaactggggagtaaactgaccgtcaacgcccccttggcgctacgggcctggagtttacgcgtcgcttcggttaattggctaaatatctctttgatatcgaggaaatagctttgcccttcctcggtcagcaggagactacgattacggcggcggaacagttttagccccaaaaaatcctcaagagacttgatttgatgacttactgcggcttgggtcacaaaaagctcttctgctgcgcgagtgaaacttaaatggcgtgctgcggcatcaaaaactcgtaaggcatttagcggtggtaatcgtttagacatggctattaaactttgatgttaaatgaatttaacaattagatcacactatgtaacctattagtttttttaatctgagccattataaattgtccgttgagcttctaccagcaaatacctatagtggcggcacttcctgagccggaacgaaaagttttatcggaatgcgtgttctggtgaacttttggcttacggttgtgatgttgtgttgttgtgtttgcaattggtctgcgattcagaccatggtagcaaagctaccttttttcacttcctgtacatttaccctgtctgtccatagtgattaatgtagcaccgcctaattgcggtgcttttttttaccttgcgatcgcgaattactgatccagttcgaccatctctttcacgtcagtacggttgatctgctgtttgttgccattagcgtctttatagctaatcataccggtatcgttatcagtctgtggtttgccgtcagagacgatggtacgtccgtcattggtgtgcatcacatagttgctaccggaacaggcgctcagggcaaaagtcagcatacaggcagaaataattgcggcagtctttttcatcatcttctccttaaagcgattaataaatcttaatagtattgattaacaggctaaaattaacgcctaacactattcagcatatgttacttacgcggcttcgccaggatatccagataattctgatggttagcactctccttgtatcaaagtgaattttgcgtcacgatcggtgcatcaagccgaggagtaccatgaacgtttttaatcccgcgcagtttcgcgcccagtttcccgcactacaggatgcgggcgtctatctcgacagcgccgcgaccgcgcttaaacctgaagccgtggttgaagccacccaacagttttacagtctgagcgccggaaacgtccatcgcagccagtttgccgaagcccaacgcctgaccgcgcgttatgaagctgcacgagagaaagtggcgcaattactgaatgcaccggatgataaaactatcgtctggacgcgcggcaccactgaatccatcaacatggtggcacaatgctatgcgcgtccgcgtctgcaaccgggcgatgagattattgtcagcgtggcagaacaccacgccaacctcgtcccctggctgatggtcgcccaacaaactggagccaaagtggtgaaattgccgcttaatgcgcagcgactgccggatgtcgatttgttgccagaactgattactccccgtagtcggattctggcgttgggtcagatgagcaacgttactggcggttgcccggatctggcgcgagcgattacctttgctcatagtgccgggatggtggtgatggttgatggtgctcagggggcagtgcatttccccgcggatgttcagcaactggatattgatttctatgcttttagtggtcacaaactgtatggcccgacaggtatcggcgtgctgtatggtaaaagtgaactgctggaggcgatgagcccctggctgggcggcggcaaaatggttcacgaagtgagttttgacggcttcacgactcaatctgcgccgtggaaactggaagctggaacgccaaatgtcgctggtgtcataggattaagcgcggcgctggaatggctggcagattacgatatcaaccaggccgaaagctggagccgtagcttagcaacgctggcggaagatgcgctggcgaaacgtcccggctttcgtagtttccgctgccaggattccagcctgctggcctttgattttgctggcgttcatcatagcgatatggtgacgctgctggcggagtacggtattgccctgcgggccgggcagcattgcgctcagccgctactggcagaattaggcgtaaccggcacactgcgcgcctcttttgcgccatataatacaaagagtgatgtggatgcgctggtgaatgccgttgaccgcgcgctggaattattggtggattaatgacaaacccgcaattcgccggacatccgttcggcacaaccgtaaccgcagaaacgttacgcaataccttcgcaccgttgacgcaatgggaagataaatatcgccagttgatcatgctggggaaacagcttccggcattgccagacgagttaaaagcgcaggctaaagagattgccggatgcgaaaaccgcgtctggctgggatatacagtggctgaaaacggcaaaatgcatttctttggcgacagcgaagggcgcattgtgcgcggcctgctggcggtgttgttgactgccgttgaggggaaaaccgccgccgagttgcaggcacagagtccactggcattgtttgatgagctgggattacgtgcgcagcttagcgccagtcgcagccaggggttaaatgcgttaagcgaggcgattatcgctgcgacgaagcaggtttaagcacagaaccgggtcggataagacgttcgcgtctcatccgacctgattgtttaaccctgacgcgccgctttcgccatcatcttcttcagcgcatgagaaaccgcaacaaacccaaaggtggcggtcaccatcgttgccgcgccaaatccagatgcacaatccatccgcttcggcccttctgccgtggctttcatcgcacacaccgtaccgtcactctgcgggtacaccagcgcttcagtagaaaacacgcaatccacgccgagcttacctttactgtttttcactacgccaaaatcgcttttcaggcgctcgcgcaacttcgccgccagcgggtcctgaatcgttttcgccagatcggtaacctgaatctgcgtcggatcaatctgcccacccgcgccaccggttgtgaccagtgggattttattgcgccgacaataagcaatcagcgccgctttgggccgtacactatcaatggcatcaatcacgtagctataacccacgctcatatactgcgctacgttatccggcgtcacgaaatcatccaccaccgttacacggcactccgggttaatctggcgaatacgctccgccataacttccgcttttgccagcccaacgttatcgcgcagggcatgaatttgccgattggtattggtgacgcacacatcatccatatcgataagcgtgattgcgccaatccccgtgcgcgccagcgcttccgccgcccaggaaccgacaccaccgataccaaccacacaaatatgcgcgtcagcaaacagttgcaacgctttttcaccatacagacgcgctgtgccaccaaaacgctgacgccatgcatcactaattaccacagacatagcacctcagaattaaaaagggcgaggttatccctcaccctaaacgcataaatgcctgatgcgctacgcttatcaggcctacataactcctgcaatattttggatttgcatgatttgtaggccggataaggcgttcacgccgcatccggcatgaacaacgcgcacttagtcaataatcaggatgtgaggttacccctcaccctgtcatatccgtaaaaacggcatacagaatatcacatcagccgctaaagacgttacctgcgcccggggcggttttcagcacccagacacgtccatagtggttgtaccaacctgcgcggtgtccggcttccggcccgatcccttgatagatatcgaagtgttggcctttgattgcaccaccgacatccagcgccaccatcagacgcagttcgtactgaccattaaatttgccgttattatccagcaacggcacttctgccagcaaggtagtacctggcggaataatggaacgatcagaggcaacactcgcgcgaccaaccagcggcaccgcacttgcccctttcaccggagcaaaagattgcggtttaaagaagacgaaagacgggttctgttccagcagctcgcgaacctcggcttcactgtgtgtttcgccccagtgacgaatcgcctgcatgctcatatcttcttttttcacttcgccacggtcgatcagcaccttaccaatgctgcgataggcatgaccgtttttccctgcatagctgaaaaagttaagcggactgccatcaccaaagtcgatatacccactaccctgcacatccataatgaagttatccatcagggagttactgtaagcgagaatatatttatcactcaatgcccccgcgtagatctccgcacgagacggcagacgaccacgttttggcggcatacggtaaataggatactggaactcgccctggcgggtatggcgcgcctgaattaccggcgtgtaataaccggtaaactgcacgttaccatagttgtcggcaccttccatctgccaggcatcaatgccgaactggcgcatattgcgggtatcaccgcctgcgcgcagccactcttgcaccgcgttataaacattactctggttgccatacagacgcggactgctattacggatatggttaatttgctcggcaaaatcaccggcgttaatcggcgcgccaacggcatctggctggttcaccagagagaaaggctgggtaaatttcccgtctttatattgctgtccgcgatcggttggtttggaagagcaggcggcaagcattgccacaaccgtgcccataagaaggtactttacccaacgtcctttcattgttctcttcttcaggttaaaaaataaggcgcaacgaagataacaaaccgccgcgtttaatgaaatgagcagcctctccctgacgcaaattttgcacaaaaaataggctttagtgatttgtttttgttcaaaatcatgccaaatccgtgatcggggtaaaaaaaaggttgcatgaaaacgcgagcggagtatagtgcgcatccacggacgcggggtggagcagcctggtagctcgtcgggctcataacccgaaggtcgtcggttcaaatccggcccccgcaaccaattaaaatttgatgaagtaaagcagtacggtgacgcggggtggagcagcctggtagctcgtcgggctcataacccgaaggtcgtcggttcaaatccggcccccgcaaccaatcaaatttgatgaagtaaaagcagtacggtgacgcggggtggagcagcctggtagctcgtcgggctcataacccgaaggtcgtcggttcaaatccggcccccgcaaccaattattgaacaccctaacgggtgtttttttgtttctggtctcccataaaaaagcgccattcagcgcctttttatcatccccttctcgccagcgtcgccccatcggcaaaatacgctttaatccccgcaagaatagactccgcaacttcctgctggaaagtcgccgttttcagtttacgctcttcctcaacgttactgataaacgccgtttcgaccagaatggagggaatatctggtgcctttagtacggcaaacccggcctgttcaacttgatttttatgcagcttgttgattttaccgagcttattcagtaccgctttaccaaacttcaggctgtcggcaatggtcaggctctgtaccatatcgaacatggtgtggtcgacatagcggtcaccgcttttgctcacgccaccaatcaagtcgctggcgttctgggtttgtgccagatattttgccgcagtactggttgcacctttggtactgagcgcaaacacagaggaaccgctcggctgacgactggtaaaggcgtcggcatggatagagacaaacaggtcagcacgctgtttctgggcttttgctacgcgcacttgcaatggaatgaagatgtcttcattgcgcgtcatgtacaccttcatattgccctctttctcgatcagagagcgcaaacggcgagctatttgcaataccacatctttttcgcgcgttttgtatttccccaccgcaccggagtcttcgccaccgtggccagggtcaagcataatgacaatcggacgatcgcgccctgctttacccggttgtggaccactttgcgctggcggcacctgcttttcgaggtcgcctttgttgtaatcctccagcagcgccagcagcgggtcctgcatatcctgtgcattggccggatagaggtccatcaccagacgctctttaaacccggcgaccggcgcaagggcaaacagctgcggttttacgttttgctttaattcaaaaaccatccgtacggtttgcgggtcaaattgcccgacgcgcgcgctcttgatgaacgggtcgtctgcacgaatttgtgccgccatccccttgagtacgctgttcaggtttacatcttcgatatccaccaccacgcgttcagggttactcaacgcgaactgcttatatttcagctgacgattactttccaccgtcacgcgggtgtagctggacgcaggccagacgcgcaccgccacgacctggctgaccgcagccagactgacctgacttacgctcaatagccacatggcacccgcgccttgcagtaaacgacgacggctgattgcagtgttggatccactcatgcctctcccgagcaaaagaaatctaagctgtgtaacaagtaaacgactaatttgaccggaaactttagcgaaagacgcataatctgtcatctaataaacggtaaacattctttttatattcacggcattactgataaaaaagtcgctctcgcataaaatttacacttgcaccctgcgaaaaaacagaataaaaatacactaatttcgaataatcatgcaaagaggtgtgccgtggtaaaggaacgtaaaaccgagttggtcgagggattccgccatagcgttccctatatcaatacccaccggggaaaaacgtttgtcatcatgctcggcggtgaagccattgagcatgagaatttctccagtatcgttaatgatatcgggttgttgcacagcctcggcatccgtctggtggtggtctatggcgcacgtccgcagatcgacgcaaatctggctgcgcatcaccacgaaccgctgtatcacaagaatatacgtgtgaccgacgccaaaacactggaactggtgaagcaggctgcgggaacattgcaactggatattactgctcgcctgagcatgagtctcaataacacgccgctgcagggcgcgcatatcaacgtcgtcagtggcaattttattattgcccagccgctgggcgtcgatgacggcgtggattactgccatagcgggcgtatccggcggattgatgaagacgcgatccatcgtcaactggacagcggtgcaatagtgctaatggggccggtcgctgttagtgtcactggcgagagctttaacctgaccagcgaagagattgccactcaactggccatcaaactgaaagctgaaaagatgattggtttttgctcttcccagggcgtcactaatgacgacggtgatattgtctccgaacttttccctaacgaagcgcaagcgcgggtagaagcccaggaagagaaaggcgattacaactccggtacggtgcgctttttgcgtggcgcagtgaaagcctgccgcagcggcgtgcgtcgctgtcatttaatcagttatcaggaagatggcgcgctgttgcaagagttgttcagtcgcgacggtatcggtacgcagattgtgatggaaagcgccgagcagattcgtcgcgcaacaatcaacgatattggcggtattctggagttgattcgcccactggagcagcaaggtattctggtacgccgttctcgcgagcagctggagatggaaatcgacaaattcaccattattcagcgcgataacacgactattgcctgcgccgcgctctatccgttcccggaagagaagattggggaaatggcctgtgtggcagttcacccggattaccgcagtagtagtaggggtgaagttctgctggaacgcattgccgctcaggcgaagcagagcggcttaagcaaattgtttgtgctgaccacgcgcagtattcactggttccaggaacgtggatttaccccagtggatattgatttactgcccgagagcaaaaagcagttgtacaactaccagcgtaaatccaaagtgttgatggcggatttagggtaagcgatgaaaatcgtcggatgcgacatgcgtaacactcgtacgtcgcatccggcaattacgtttattcccgactactaaacaacgccgccagaccactgcgccgctcagtacgagtggcgattgccgcacttaatatgcgctcatcggcatacaggctcagacggcgacgcgcgcgggtcaccgcggtataaaccagctctcgcgttactaccggcgtgcgttggctcggcaaaatcaacgccgcatggtcgaactcgcttccctggcttttatgtaccgtcatcgcccacgtagtttcgtgctctggcaagcgactcggttgcacagacttaatattgccgtccggcatcgcaaaccagacgcgcgtcccctgcccgcgatccagcgcaataccgatatcgccattaaacaacccaagcgcgctgtcattacgggcaatcatcaccggtcgaccttcgtaccaacgagagtgcggatgacgatgaattttgcgcttctgttgcataaactgctcaattcgctcattcagtccagccacgccaaacggcccttcccgcagggcgcacaaaagctggtactcattgaacgcctgaatgattaaatccggctcggcacgcgcttgcagcagatccagataacgtccgtaacccgcaagagcttcctcaagcatcgcaatataatcttcgccgctctgtaaaagccgtttttcgatatcagtaaaatcctgctgaaaaacggttttcactgccgttttatcaccacggttgatcgccgcagctaactgaccaatgccagaatcgctgccgaaacgatagcttttttgcagcaggcagagactgtcgcgcaaagatgccgcttctgtgccggttcctgccggaacgtgagtccccgtcaggcggcttagctgcctggcacgctcggcggtaaagcccgcgttggcataagcgcagatatcgcccagcacagccccagcctcaacgctggccagttgatcacgatcgccgagaaagatcactcgcgcatgatcgggcaaggcgtcgatcagtctgctcatcataggcagatcgatcatactcgcttcatctaccaccagcacatcaagatgcagcgggttaccggcatgatgacgtaaacgctggctacccggctgcgcgcccagcaatcggtgcaaagtgctggcatcttccggaatgcgtttcttttgttcatcggtcagcggtaactgtcgcaaagccttgccgagagattcggttaagcgcgcggcagctttacccgttggtgcagccagacggatacggcagcgttcgccgtcggccatttgaattaacgctgccagcaacttcgctacggtggtcgttttaccggtgccagggccgccggaaatcacgctgatccgccgcgtcagcgccactgccgccgcaactttttgccagttaatttcatcgcttactggaaaaagtttgtccagggtttgcgccagtagagcttcatcaacctcaatggcatgattcacttcgttgaaaaagcgtgccactgtgcgctcgttacaccacatgcgattcaaataaagacgatcgccacagaggatcatcggcgtgggttcatctcccctgctgaccgcttgagaagccagcaagcattcttcccaattttgtagctcaccgatttcactgacacaggtcgccaacagcggatggctcgcctcgttattttccagtcgactaagcggcaaacaaacgtgtccctctccggcatcatgacttaacagtgccgccgcgagggtgacggcaggatgttcatctcccgccacggtcagggcaaattgcacatccagcgggcgtagctgtttgtgctccacagcttccagtaattgcttttgcaatttcattacgcctcctccagggtcataccggcaaacatctcatccatcagggcaatcaacccggcgttgggtcgggttgtgtaaatcccctgttgcggatgttctttatcaacgccacgcaggaacagataaataacgccgccaaagtggtgctcatagtcgtaatcagcaatgcgatggcgcagataacgatgcagcgccagggtataaagctgatattgcagatcatagcggtgtgcctgcattgccgctgccatagcctgttgggtgtaagcgctactgtcttcacccaaccagttggatttatagtcgagcaggtaataacgcccttcgtggcggaacaccaggtcgataaagccttttaacatgccacgtacctgcatgaactccagcggcgggcagcctgcggatagcgggtcaaactggcggattaacgtatcaagctgactggcgataagcggttcactaatcggcagataaaactccatctccacctgtttattgcgggcggaaagttgactcaggcttacgccggtttcattgagaggtgcctggaggacagccgtgatccactcggtcaataccggttcccactggctttcaaagccgccgagttccagtttttcccgcacccagttcgggtcaaccggctgggtaaaatccaggtcttcaaacaaactgtgcaagaacgtccccggactcgcaccgcgcggaaactgatgtggtgttaacgtcggttcttcaacgacgctggcaacgcctgcagcatcgacatccagccgaggcatcaaatcctgggcgataccgtgaccacgctgttgcaaaccagagtagctggtgacgcgccagttatcgccgggcaatcgttgtaacgtcttcgcattcagctctgctgtagaaacatcattaacctgccagggttggttatcaccagtttgtgccgtttgccaggcaatatcatcatcgcataacgcttcaatacaggtgcgaagccctgccgcatcttgcggttcccctttttgcagcaaacgcccgagcgcactttggtggacgtcggtgtcaccttttttatcgccacgacggcgcaccagcggtgcaacgccgagactgcaatgccaaacgctacgtgtcagcgccacgtaaagcaaacgcagatcttccgccagacgttcggcctccgcgaggtcgacgctttctggcgcagcattaagatccagaactgcctcaaagctgtggcgatcgtgataaaacgcctgctcctggacgcggaaattggtgataaacggcagccagaccaatggatattccagccctttgcttttgtggatcgtgacaatctgcaccagatgtttatcactttcgagacgcatttgttggctggaggcattactgtctggctcgaggatatgttggcttaaccagcgtaccagcgcatgttcactttccagctgcgttccggcttcttgtagcagttcgctgatatgcaagatatcggtaagacgccgctcaccgcctgccgttgccagcaagttttcagcaatgttacgcgcgctcatcagcgcccgcagcatcggcataacgccacgtttgcgccagatttgccgataaccatcgaactcttcgactaccacatcccacgcatgttcgtcattgttcagcgtttcgatatccagcgcgttcagccccatcatactcgttgccagcgcactacgcagggtgttctcacgttcgggcgtcatcaccgcctgcaacaaccaaagcatttcctgcgcttccagagtttcaaaaacactgtcgcggttgctaaggtaaacggaagggatttccagcaacgttaaggcatcgcgcacctgggcggcctcctggcggctgcgcaccagcacactgatgtcgctagcacgcaccggacgcgcgtcgtcgccgttcatcagcaacgcttcgccccgctgtccggcttgtagccagtcgcggatttgcgcagcacatacctgcgccatggtactttgataatcgccaacgccgcagctttcgccttccatcagccacattttcatcgcaggctgtgtttcacctttaaatacaaaacgtaacgcctgatttttcccggcacttttcactggaataaacggtatttcgcgaaacatgaacgcgtcatcagtctggctgaaaagcttattcacgctgttcaccattcctggtgcggaacgccagttggtgtctaaagtgtagtgggcgtgaacttcgctacgcgccttcatataagtgaagatatccgcaccccggaatgcatatatggcctgcttcgggtcgccaattagcaacaatgcggtttccggctgatggtgccagatacggcgaaaaattcggtactgctgggggtcggtatcctgaaattcatcgatcattgccaccgggaatcgcgtacggatcgccgctgccaacacctcaccgctttcgctacgcagcgcggaatcgagccgacttaacatgtcatcaaaacccaattcgccacggcggcgtttttcacgcgctactgtttcgcggatctcagccaatgcgcgggtgatcaccagatcgcggatgctcaatggttctgcaagcagttgatcgatcgcctcaaacagtggatgtcgcggggtttcccccccggccttcgtgcgatcttctaagaaacgctgggagaatttttccaggctctccggcaactgataactgtttgtctcttcttctgcccaggcgctgatcttgtcgatccatttagcctgattgctacggttaaacttgcgtcgatcaataccagaagattcgatcagcgcatccagttcacccactgcgtcgcgccactgctgttttaccgtatcaatacgcgccacaatttgcgcgtgacgggaagccagcgtttcatcatcgggcggcggtgctttgataaccggcgcttcgccttgcagataacgattaatatcgcgcagcaacgcctgcggccctttccaggtttcaaagacgacctgggctatttcacgcggcagcgggtagcagtggcgacgccagaaatcggcgcaggcctggtagcgtagcagagactcatcttcaatcagctgctgctcaaacagcatgccggattcaaaggcattcaggttgagcatgcgctggcaaaagccgtgaatagtaaagactgccgcttcatccatctgccgttcggctaacaacaaccactgcgcggcttgcgctttatcgtcgatctcttccagcaggcgttcgtacagtggattgtcggtggtttcacgcagacaggcgatgcgcaactcgtggatattgctacggatacgaccgcgcaattctgccgtggcagcctcggtaaaggtgaccaccagcagttcttcaacggtcagcgggcggggaaaggcggcggaaccgcctagtccaagtaacaggcgcaaatagagcgccgcaatcgtaaaggttttgcctgtgccggcagaggcttcaatcaggcgctcaccctgtaagggcaagcgcaaaggatctagtgtctcggcgacatcactcattcttttcactcatcaggggcattgtttgctgcaacgcgctgacgttctcccacactttccagccttcagggtgtacatattcggctttcccgttctggctgccggaaatctggctcagaatagccatgccttgcggctcgaccaccgcctgatggaagaaatcagcaagtttttgcggcgtcagcagttttatctgggccacgattttatcacggctatcgaagcgcatattgccgcgatcgaaatctttacttaacttgcttgcttcttcgccgagcgtttgcggtgcctgcagcatctgggtaattaccgcctgctggatttgcgcaaactcatctggcttcatcgctcgcaattttgcctctgcggttgggaaaaacgccttgtaacgctcccacaagaaactaggctgtttatcattgctttgcaaaaggaagcccatgccccactgacgccccacgctcattggaaacgcaaacacggcatagcccaattgttcttcggtacgcaactgattgtagaaccacggctgtacgatctgccccaacagagagctataggcactgctggtgtattcatcgtagccagtcggtacaaataccgctgccagtgcggagtcggtgctgttaccggctttttcaaagatgacggattgttttttatcgaccactacatctttgtttcgacaccactcactaccatcagcgcccaactgtttttgcacatcgcgtgccagcgttgttgcctgggcctcggtcatgttgccgataaccataaactctggtcgagccccactttttaaggcgtcgcgataggccagcacctctttcaacgtaatggagggcaaaattttacgccgttcatctcggctgaagtacggcacttggctgagcatctgcgcgggcataatcgcctgctcaaacgctttacccttttctgcggaatccatcatctggttataccaggacttcgcctgctcaagctgatcttccgtagcggtatagctaaagtacccctcgagcaatgcctggaacagctgcggcagacgctgggtgtaaccattagcattaaccataaggccgttgttagcgttggtggaaaaacttatgccaccaacgctcgcctggttgcttaactgatcaagcgccagccctgcgagataatcattgagcgcaaacatcacctgattgcgggcgctgtccatggctttcggattacgcaaaatcaggctgacatcagctttgggctcgctggcaaaataacggcttggcgcatacaccacgcgcagattgctctcatcaacaatcagctctggatggtcgtatttcttctcactcttaatcaggctgaaatcatcaggaatataagggttaagctctggcaaagagagcgcaatgtcggcggcttttttctgccagtcggcgaaagtttgtgcgctgattttatcgacctgatacggcgcatcgacaaagtaagccgttttgttgtgcggctctttcgggctgatataccagatacgcgcattctgcggcgtcatcatcgccagacgttcctttactgctttagcatcgtaccgatcggcaatattgactgcatccagcgtatgctcaacaggaacgcgaatcatggtatctgccagccattcgacgtaatccatatcacgggtgatgctcggataacggaagtcgatatccagcacattcgccagttcatcgaagtattgtttatcaatgcctttttcacgtaacagattgagatagctaaaaattgccgccacaacctgatcgcgattagccaggcctttatcggttaaagacgcagagatcgctaatacgccgctgttgccgttgacgataggatcggagttggcgctaatgccctcaactaatccctgcttttgcagccagtcagaaagtgtacctgggctgcgattgccaatcagataggtaatcaattcatcggttttactacggaacttcgcactgttgttatcgatgcgaaactcaacgcgcaacactttacgcggcagcgcagggacgtaatgaatgataatgcccttttgcgcgtcggtgactaccggcacggtgatttccggttttttgctctctttgttcggcacgcgaccaaaggtgtccgccgccatttttgccaactccggcagcggtttattactgtaaataaccgccttcatcaaattggcggaatagtacttctcgtggaaatctttcagcgcctgctgcaccggattaccaggtttgtcgcttaaagtttcgaggttaccaccagaaaacttactaccggggtgtgccgggttaatggtttctgcgctgacctgtgccatgcgcatcccgtcacgcgtacgcgccatggttaattcagcgttcaccgcattacgctcacgttcggcatatttcttgtcgagcaaaggttcagcaatagcatcggccaggcggtctaccgcaccaggcaaggcgtcgttctcaacttccagatagaaagccgtgcgatacggcgcagtgctggcattgtgactaccgccgtgcattttgagatattcggccagactgtcagcctgcgggtactttttgctccccatcagactcatatgttcaaggtaatgtgccagcccctggtacgcctcgggatcttccaggctcccaacgggcaccaccagcgcgctgaggcttttaactgcctgcggatcagaaaccagcaagaccaccataccgttatccagacgtatagcctgatactggcggttatctttatcacttttacggatggtttcctgaatcggctgccatcccgtttctgcctgacttaagggtgcccaaagggcaactaacaacaataatgctttgaaccaggtgctgcggggcattcacggacctcataatcaacttaattttctgtccagattcaacacgttaacgcaaatcatctgccagaatttaatcttgtgctgcacgagtcagcctatgtttatataaccatcagtccgtgactggtgcgcatcataaagtaagcggatagattgcgcaatttttatacagcactcaactctgattaaagcgaaacagcggtaacaggaaacgttggctctgttcaacgatggcctccattgtctctggtgttaattgccgccagagcctttgataccagatatcatcaccttcgccacgcaccatcatgttgccttcgtaagcctgaaggaatttcgtacgggctttttgcaacgtggaatcgtcatccagcatggcatcgttttgcgcgtcataacaggtttttagccacgcgccgccactttcaggtaacaccagcaatggcgcggacattccttcacgatacccctcaatcagttgactgaggtaatgcaaagcctgttcggctgcaagcggcggaaaacgccactcgccgtctttgcgtagaaaaaggcgactttcaccattaccaccgctggcacagtagacaaggtgttccagccaaagttgcattccctgggccacacttaataaagagggacgccagcgcaacaggccatccggctgcacctgcggcaaccagccagttatctgcacaccgttgcaggcgagatcaatttccatactctgccccggctggcgacaggcaatgactctgtcggcaagctgctgcatctcctggcactgtgtttcccagaaaatttcaccaaaagcgccatacggtaaatcccctgccgctcggaagcggcggaacaagcgttcggcatcatcctgctcaaccagtgcattcaataactgctgattgatttgataacggctaagtccttccagaataaatggctcggtgtcggggatttcgctgtcttcagtacggaagttcacctgcaaacgcatctggaaaaatgcccgcaccggatgtgcccagaatcgttgtagcgtttccagcggcacggtttccggtaaggtaaacggcagcggctgaacaaattcagaatgtgctttaccagcctggctggccgcaggtagccattcacgagcatagctttgtcgttcgcctggctggtagttttgtggatcaaacggcatccgggtatggaggcaagtaagatgcgcttttacccttgcctcgctttcatcacagttgagcgcttcatcgcccggtagataatgactttgcccgatgtagtcgatcagttcctgcaccagtacgctcgggaaacgctcactgttatcctgaatggaacgaccgatatagctgatatagagtttttgctgcgcggaaattaacgcttccaggaacagatagcggtcgtcatcgcgacggctacggtcgccacgcttcggtttctggctcatcaggtcaaagcccaatggcgcaagctgacgtggataaacgccgtcgttcattcccagcaggcaaaccactttgaacggaatactacgcattggcatcagagtacaaatgttaaccggtccggcgagaaaacgctggctgatacgttcttgatccagacgctgtgccagttcatcacgcaatagactcagcggcaccgcgtcgccatactgcgcacctaaaccttcggcgataatcgcctgccattgttgttcgatcagcgtcatcgccgcttcggtttccgcatccggcaggaagaaggcgttgagcatatcgcgacaaaccggcaaccactcttccagcggacgctcctgtgccagcccgcgacgccagatgtttagctgcattagcagactagccagatgccccaccagttctgcaattaagccgctgctttcatcataaggtagaacgctttgccactcgccctgcgcgctctccatcgcgtagcccaacaacatacgcgtcaggccaaatcgccaggtgtgttgtccggtggcggggagttccagctcgcgaacgttgtcgtcatctatgccccaacgaatgccggattcgttgacccactggcgtaaataacgcagcccttcttcggtgatgtcaaaccgcgccgccagcaccggcacatccagcaacgccagcacatcctcactcacaaaacgactgtcaggcagacttaacaggctgataaacgcttccagtaccggatgactctgccgcgcacgacggtcggaaatggcgtaaggtaggtaacgatccgcaggtgcgctaccaaacacagcctgaataaacggactgtagctgtcgatatcagccaccatcacgatgatgtcgcgcggagtaagtgtcgggtcttcctccagcatcgccagcaggcgatcgtgtaaaacttcaacttcacgctgcgggctatggcaaacgtggaaggtgatactgctatccagtggatcaagcgggcgtttgttatcgctacgggaaaactcttcgatgttcacaccagcaacggcgcggttttccagttccagaatgtcagactgaatgttatgcagcaggttatctggcgtgacatcgacaaaggcgtccagctcctggctgctctccaggtcagaaaggagataaatgtagtcgcgcccaagcttaccccaactagccagcagcgggttgccgacatcctgttcaccatcgctgttaaagagctgcccggcattttcgctatcacgaaatagcggcaattcgcgatcttcaaaactgtgtcgacgctgacgggtcagcagtttcgccagataagcaggatctttaatatcgccccagtaataacggcaggggttggtaaacaggagatggatttcaatatgtttacccagcgcctgtagcgcctggagataaacaggcggtaacgcggaaataccgcatataaagacgcggctaggtaaccccggcgggcaggtcgtcgcggactccagcgtttcgataaagcgctgatagagattggcgcggtgccagcgcggttgcccgagttgatgggtatattccaccagcgccttccacaacggggcttgccaggcctgtgcttctcccagcccttcaaccaaatgtcctgtttcccactgtgccagccagtccggacgatagaccagatactggtcaaacaggtccgccgctttactggaaagctggaacagttttcgcttgtcgctatcgtcagtcagataatgccgcaacagggtaaagtcttcgcgctccagcaattgcggcagcagagtcatcagtttccagctcatgctctgtttgttaaaggcgctctctttggggatttccggtaacacccggacgaacatatcccagataaagctcgctggcagcggaaaatcaatgtttgccgcaataccaaacttttggctcagggtcatttgcagccactgtgccataccggtactttgcaccagaatcatctctggttcgaaaggatcgtccagccgttcgcgttcgacaataaactccatcaacgcttccagcacgtccagacgattggaatggtagacccttaacatagcggctcctgattactgacgattcgggcaatgcaggcgggtcatctcgccttctctgcccccgggactaactagcgtaacgctgatgctgacacatcccgcctggcttgtctgcattcggttgacctgccagttggcaggtgggctaatcgcgcgcagttgcgtttgctgccagccatgccgccagagctgttggtactggtttctgctggcaagactgttcattaatgttcgctggaaaccgcttaacgcagtgacaatcatcaccatcaacaccatcgccaacattacctccggcaggctaaagccttgttgattcttcagggaagcactcataacgccctctctttcagcggttaaatcagggaagctgacataacgccctctctttcagcggacaaaaatcgctccagccgcgtgggctaaaaacaatgtttccatcaatgacttcgcctgttcgccacaagctaacgccttcataaccggcaatcaataaggcttcattatctgccagtaaacgcaaacaaacctgggcatcggtttcagcgtactggctgcactgaactgctggctgcgtctgccagcagtgcatttttccccacgccagcgcgctctgaacgatggcctggcggcgcaaactctgactttccatgctcacgcgagaggcaaaactgcgatcctgttggctcattccttgtaatagcaaactacccaaaaccagcagcatcaggaccagagccagactgctaacacccttttcgcggttcacaggttgaatcctgtcacgctatagctggcattcaccacggtttgcggttcagacttactggcagcacgcatattaaccgtcaacaccgggctgaagccgctgacatcctgacgtacgacctgaaaagtgtcgataatgatggcatccggattagtgactttatcccagcccttaccttcacaggatgtcgcaccgcgtagcgtttccagcacatgctccttcagacgaaatccaatctggtcggactcttttaccggttcgcgatcccagataccgttactgttcgcatcccactgcacaatgacacagtcaccctgtccgacaatttccagcccttcgccggtacagatgccatgacaataacccgccctctggagatgcttcgcgacggtaaatacccgcagccagatttcatcttccagcgccagcttacgggtgctcgttaaactttcacgctgtaacgcaggcagaaagcgtgccgcccccagcaacaatacgctactgatcgccatagcaatcaacacttccagcagagaaaaaccttgctcttttacaggcatccttctgtttctccttgctgacaaagccggagtcttccccacgggctaaccaccagccaccactcgcccgtactgtttttgaagcgaatatgcccggcccatgcggtattgcgcaggccaaagaaagcaaggctaggtgtcaggtcgctcatttcgacttcgggccagcgtggcacaaagaccaatggactactgccatgacaggtattggccccagcagcggaactcacaaggcaccataacgtcccctccctgataacgctgatactgtggtcgcggttatgccagttggcatcttcacgtaaatagagcaaatagtcccgcgcctggctggcggtttgccatagccgttggctctgctgccagtattgccagccatagagtccacttgcgcttagcatgaccaaaatcagcatcgcgaccagcgtttcaatcagcgtataaccacgttgtgttttcatgccggcagtatggagcgaggagaaaaaaagacgagggccagtttctatttcttcggcgcatcttccggactatttacgccgttgcaggacgttgcaaaatttcgggaaggcgtctcgaagaatttaacggagggtaaaaaaaccgacgcacactggcgtcggctctggcaggatgtttcgtaattagatagccaccggcgctttaatgcccggatgcggatcgtagccttcaatctcaaagtcttcgaaacggtagtcgaagatggattcgggtttacgtttgataatcaacttcggcagcggacgcggttcgcggcttaattgcagatgagtttgatccatatggttgctgtacagatgcgtgtcgccaccggtccagacaaaatcacccacttccagatcgcactgctgcgccatcatatgcaccaataacgcgtagctggcaatgttgaacggcaggccgaggaagacgtcacaggagcgctgataaagctggcaagagagtttgccgtctgccacatagaactggaagaatgcatggcacggtgccagcgccattttatccagttcgcctacgttccacgcactaacaataatgcggcggctatccgggtcgtttttcagctggttcagtaccgtagtgatctggtcaatatgacgaccatctggcgttggccaggcgcgccactgtttaccatacactggcccgaggtcgccgttttcatcggcccattcgtcccagatggtgacattgttttcgtgtagataagcaatgttagtgtcgccctgcagaaaccacagcagttcatggatgatggaacgcaggtggcaacgtttagttgtcaccagcgggaatccatcttgcaggttaaaacgcatctgatgaccaaaaatggaaagcgttccggttccggtacggtcgtttttctgtgtgccttcgtcgagcactttttgcatcagttctaaatactgtttcatggttcctcaggaaacgtgttgctgtgggctgcgacgatatgcccagaccatcatgatcacacccgcgacaatcatcgggatggaaagaatttgccccatgctgatgtactgcacccaggcaccggtaaactgcgcgtcgggctggcggaaaaactcaacaatgatgcgaaacgcgccgtaaccaatcaggaacaaaccactgacagctcccattgggcgtggtttacgaatatacaggttgaggataataaacagcaccacaccttccagcagcagctcgtaaagctgacttgggtggcgcggcagcacaccgtaagtgtcgaaaatggattgccactgcgggttggtttgcagcagcaaaatatcttctgtacgggagccagggaacagcatggcaaacgggaagttcgggtcaacgcggccccacaattcaccgttaataaagttgcccagacgcccggcaccaagaccaaacggaatgagtggtgcgataaaatcagagacctggaagaaggaacgtttagtacggcgggcgaagataatcatcaccacgataacgccaatcaggccgccgtggaaagacatgccgccgtcccagacacggaacagatacagcggatcggccataaactgcgggaaattgtagaacagaacataaccaatacgtcccccgaggaagacgccgaggaagcccgcatagagtaagttttcaacttcatttttggtccagccgctgcccggacgattcgcccgtcgtgttgccagccacattgcaaaaatgaaacccaccagatacatcaggccgtaccagtgaagcgccacgggtcctatactgaaaatgaccggatcaaactccggaaaatgcagatagctactggtcatctgtcaccacaagttcttgttatttcgctgaaagagaacagcgattgaaatgcgcgccgcaggtttcaggcgctccaaaggtgcgaataatagcacaaggggacctggctggttgccggataccgttaaaagatatgtatatgatccgcgttataaccctccgcgaatcagcccgcccatgccgcgacgctccataaaggctgcaacctgatggcgaacttcggtcgccagttgcgcttccagactacgctgcgcaagattttctgcttcggcataatcaatgcgccgcagcaggtattttgcccgcgctacagaacgtccgttcatagacagatggcgatacccaagcccaatgaggattgccacgcacatgggatcgcccgccatttcaccgcacaaacggagatcgattccatgtatttccgcttcccgggcgatcatcgccagagctcgtaacattgcaggatgaagactgtcataaatgttcgccacccgggtattgttgcgatcaacggccagaatgtattgagtcagatcgttggtgccaacagagatgaaatcgacccgctttgccagatgcggcagcataaataccatactcggcacttccagcatgatgccgatacgtggtttgggaatttcgtaaccgatcatctcctcgacttcacgtccggcacgttcaatcaggcggcgtgcttcatcaacttcatcgaggcttgtgaccatcggcaacagaatattcaggttgcccgtagcggcattagcacgcagcatcgcccgcacctggatcaagaagatctccggctgatcgagcgtaatgcgaatcccacgccaacccaggcatggattctcttcgctgatcggcatgtaaggcagctgcttatctgctccgacatccagcgtacgcaaggtgacgggtttatcattgaacatttgcagcatcccctgatactgcgccacctgttcttcttcgctcgggaaaccactttgcagcatgaatgggatttcagtgcgataaagaccgatgccatcaatacggctgcccagtttttcttcatgttccgggcttaaaccagcattgagcatgacttttatacgctcaccgctttttaactgcgcgggtaaattgacgtcatcttccgccagacggctaagctcaatctcttcactaattagccgctgatattcttgcagcagtaccggctccggatcgaccagcaattcaccgcgatagccatcaacgatcagcgtcctacgatgcagcacgctaggctgaatatccgcgcccatcacggtagggatccccagcgcacgtaccatgatcgcagcatgggagttggctgcgccatctcgcacgacaacaccgactaagcgatcctggggcagctcagcaagcgttgtcgcactcagttcatctgccaccagaatgaaacgttccggccaggcgttcggcccttgattagcgtcatcaagatgaaacagcaatcgctgacccagcgcacgtaaatcgccagcccgctctttgagatagttatcacttagcgcggcaaactgttcggcaaatttttcaatgaccgtttttaccgcccactctgccacgctgcctttatcaacctcggcaaacaattcgcgacgcagccgggtgtcgctaagcaggtggctgtaaagatcgaaaatagccgccgtttctttttgtgcaccggcggcaaagcgtttgctgtagcggcgaaactcgtttgccgcttcttccagcgccccggtcagtcgttcgcgttccagagccggatccagcgtacttgcctgatacacctgttccattaaaggtaacgtggcatcctgccagccttcggcaatcgccacaccaggtgctgccggtaatgcgcggattcgcgtctggcgatattgcccaaacaaggcagtcaactggctctgagaaagaatagctgccatctgggtggcaagcgtcaccaggaaggattcttcactttcgtcatactggcgcaactctcgttgctgtaccaccagtacaccaagcaactggcgacgttgaataattggtacgcctaaaaacgcgcggaaacgttcttcttttacggaggggatgtatttgaagctggggtgcttttgcgcatctgcaaggtttatcggttccgccagcctgccaaccaggccgacgatcccttcatcaaacgcgagcgttacagtgcgaccgcgtggttttttcagcccccgggtcgccatcaggtagtaacaacgtcgatcatgatcggccaggtagacgctacagacctcggtatccatcgcaagacagatgtcggtaaccagaatatttaacgcctcattcaggcgtggtgcgctggctaccttttcgactatttcgcgcaggcgagtgagcataattggcgtgacttaacctcttttacgtcgataagcagatgcgttttgtggttttggcgtattttcctgcagactcatcaccacactcgcgaactctttcattaccctacggtagacatcacgtttaaaactcaccacctgtctgaccggataccagtaacttacccatcgccagccgtcaaactctggtgtactgctggtttgcatattgatttctgcatcgccgctcaccagctgcaagagaaaccatttttgtttttggccgatacaaaccggcttcgtgtcccaacgcaccaaacgtttcggtaatttgtagcgcaaccagttacgcgtactagcaaggattcgaacgtctttgcggcttaatcctacttcttcaaacaattcacggtacatcgcctgctctgcggattctccggggttgattccgccttgcggaaattgccaggagtgctgaccaaatcgccgggcccacattacctgcccctggcgattacaaatcacgatacctacgtttgggcggtagccatcgtcatcaatcaccggactacctcaaaataaagctttatatacgaatgattgtttcatactccaggaagacggtaaaccactctctgcagggcattacacactaataacaattgaataactcacagttatgtgcagagttataaacagaggaaggggtggatagccgtttttattcaccttttctgtggatagagttgtgaagaactacggaattactacgggaaaacccggagcattctgaataagcccgatatagacattttaaaatattcattatcagtcaatgcattacatgtaattttagtaatgaaaaagagtaattcgtgacccaggtcacacctctcatttacgggttggcgaaagatcaaccaatgccgtatttatccacagaatgtgccactaagttaagcactgaaccactaaaaactggagtttcgtcgcacgtcaaggctgtaaatggaaacagtagtggaggtttttcacagttatcccagctttctgtggataacatggtgtaagatcctgtttattttcagtgaccagatttggaaaacccgttgcagtgttgcgcaactcgattaccggcaacctaaaaagcaatataaatcagagaattgaacaacgcatgtggaaaaagttacactgcgaatattcggcacataattgctgtttgttttttaatcaaggtatcatgacatgtcccaacctcgcccactgctctctcctcccgaaactgaagaacagttgttagcgcaagcacagcaactttctggttatacattgggagaactggcggcacttgtcgggctggttacgccagagaatttaaaacgcgataaaggctggattggcgtgttactggagatctggctaggtgccagcgcagggagtaaacctgagcaagattttgctgctctgggcgtggaacttaaaactatccctgtggatagtcttggtcgtccgctggaaacaacattcgtttgtgttgccccgttaacgggcaatagcggggtgacctgggaaaccagccacgtgcgccacaaactcaaacgcgtactgtggataccggttgaaggcgagcgcagcatcccgctggcgcagcgtcgcgttggaagtccgttgctgtggagcccgaatgaagaggaagaccggcagctacgcgaagactgggaagaattaatggatatgattgttctcggtcaggttgagcggattaccgctcgtcacggggagtatttacagatacgaccgaaagcagcgaatgcgaaagcgcttaccgaagccattggtgcccggggcgaacggattctgacgctgccacgcggcttttatttgaagaagaatttcaccagtgcactactggcccgtcattttctgatccagtaaccatcgctttgacctgccgctttccgggcatataattaccgcttcatttttttggcagggctttttagatgttatttgcatggataaccgatcctaacgcctggcttgcgctcggtacgctgacgctgctggagatcgttcttgggatcgacaatattattttcctttctctggtggtggcaaagcttcccacagcacaacgtgctcatgcgcgccgtctggggttggcgggagccatggttatgcgtctggcgctgctggcaagtatcgcctgggttacgcgcctgacaaatccgctttttacaatattcagtcaggaaatttctgcccgtgatttgattctgcttctgggtggcttgttccttatctggaaagccagcaaggaaatccacgaatccattgaaggtgaagaagaagggctgaaaacacgcgttagtagtttcctcggcgctatcgtgcagattatgctgctggatattatctttagcctcgacagcgtgattacggctgtgggtctgagtgatcacctgtttattatgatggcagccgtggtgattgccgtaggcgtgatgatgttcgccgcgcgcagcattggtgattttgtcgaacgccatcctagcgtaaaaatgctggcgctctctttcctgattctggtgggctttaccctgattctggaaagtttcgacatccacgtaccgaaaggttacatctacttcgcgatgttcttctctattgcggttgaaagcctcaacttgattcgcaacaaaaagaatccgctctgatactccgtacgctctcctgcgggagggcgtactcactccttttaccctcacagtttaagattttcctgctttcaagatatataacgtcggtttataaacagactattatcataggtaggccaaatgaggataaccggatgaaaaaatgggcagtaataatttctgcagtcggactggcgtttgctgtttccgggtgttccagtgattacgtcatggcgaccaaagatggccgtatgattttgaccgatggaaaacctgaaattgatgatgataccgggctggtgagttatcacgatcagcaaggtaacgcgatgcaaattaaccgtgatgatgttagccaaattattgaacgttaacaaataaggtcagcatccggctggccttaagatttttctctttcccttttcccttccctctgccatttttatattccttatgtcgtgattataaaaaggaaacggctatgcaatatcaccgtataccccacagtagcctggaagtcagcacgctggggcttggcacgatgacgtttggtgaacagaacagcgaagccgacgcccacgcacaactcgactatgccgtcgctcagggcattaaccttatcgacgttgccgaaatgtacccagtacctccgcgccccgaaacgcaagggttaaccgaaacctacgtcggcaactggctggcgaaacatggcagccgcgaaaagttaattatcgcctccaaagtgagcggaccgagccgcaataatgacaagggcatccgcccggatcaggcgctggatcggaagaatatccgcgaagcgctgcatgacagcctcaagcgcctacagactgattacctcgatctttatcaggtgcactggccgcagcgcccgaccaactgcttcggcaaactcggttatagctggacggattctgcgcctgcggttagcctgctggatacgctggacgcactggcagagtaccaacgcgcgggaaaaattcgttatatcggcgtgagcaacgaaactgcatttggcgtaatgcgctacctgcatctggcggacaaacacgatctgccgcgtattgtcaccattcagaacccttacagtctgttaaaccgcagttttgaagtaggtctggcagaagtcagccagtatgaaggggtcgaactgctggcctatagctgcctgggtttcggcacgctgaccgggaaatatctcaatggtgcaaaacccgctggcgcacgtaatacgctctttagtcggttcacccgctatagcggtgagcaaacgcaaaaagccgtcgcggcgtatgttgatatcgccagacgtcatggcctggaccctgctcagatggcgctcgcgtttgtacgccgtcaaccgtttgttgccagcactctgctgggcgcaaccacgatggatcagctgaaaactaacatcgaaagtttgcatctggagttaagcgaagacgtattagctgaaattgaagcggtgcatcaggtttatacttatccggcaccataagattaacgccggttaaaaccggcgttaaatattaatgacggcgctgccagatccacagcgccgttattgccagcgcaaacagcgcaccgaagccaatgccaatgggcacgaccgggatgcctatcattaccgccaggctgtaaatgcccagcatcaacaacatggcgctgttttcgccaaggttttgtactgcaatcgcattccccgccccgacgctttttttaccccgctcctgtagcaacgcattgagcggaacgacaaaaaagccccccatcacgccaatcagcatcaacaaggcataggctggcagcagctcgtgttgcagggaaaaaatcagtaccaccacgccaatcaaaatcccggctggcatacagcgactcacggtttccagcgtaactaacttcgctgccgcacctgcgccaaccacgataccaatcgctaccatcgcgttgagataggtgggcgtagcgttatcggtaatgcccagcgccaccggtacccacagcaccaacaggaaacgcagcgtgacacccgctccccagaataaactggtgcccaccaggctaaaacgcgtttcaccattgcgccataggctggtgcaggcattcaggaaactgcgggtcatgttgatgagattccaggactgccccggacgcgccgccgccagtttgggaatgtagatattggcaacgaccgcaccaccgtaggccagtgcgcatgcggccagggcgacgaggacatgccagtcagccagcacaccaccggctacggaaccgagcaaaatcgccgctatggtagaagcttccattaaaccgttagctttcactaacttactacccgtggttaattcgccgagaataccgtatttcgccggactataggctgcagcaccaacacccaccagcgtatagccgagaaacggattgataccaaagcagatactggctgcgcccagcagcttcaggccgttggcaaacatcatcacccggcctttggcgaagctatccgccacctgcccgacaaacggcgcaaaaagaatgtaagcacctacaaacaccatttgcaggatgggctggctccactccggatagaactgcgctttcagtaacgccagagtggcaaacagtagggcattatcgccaaacgcagagagaaactgcgccacgataaccgctttcatccccttgctccacaagctagtgttagtgtgcacactctcactcatcgtgttgttccgcttcgtctacccagcttttcaacgtgacaaagtcaggtttgccgctgccaagtaatggcatctgtttcagatagcgaatatcgcgcggtacagcaagctccggcacgccgtgctcgcgggcatactgttgcaacttatcgcgcgtcagttcgttatctgtggtgaaaagcaccagtgcctcgcctttgctggcatcgctcttaatcgcagtggcatggactttatctgggctaacaccaagtgccagttgttccaccatttccaggctcaccatttcgcctgcaattttggcaaagcgttttgcgcggccctgaatctgcacaaagccctgctcgtcaaaacgcacaatatcgccagtgtcataccagccgcgctccatttcgccgcgaacattctcggcggtgggcacttccagtacacctggcttctccacccgcagatagccgttcattatgttcggccctttcagttgcaggcgtccgccctcttcgataccagggacgctcaacaggcgcgcatccattcctggtagaatacgccctaccgtaccgggtttcgccgccatcggtacgttgatagaaacgacaggcgcgcattcggtcacgccgtagccttcaaggatgcgcaggccaaatttatcctgccaaagctgtttggtactttcttgtaatttttctgcgcctgccaccacatagcgtagacgatagaagtcatacgggttggcgaaacgcgcgtagtgaccgaggaaagtgctggtgccgaacaacacggtgcaactgcggtcatacaccaactccggcacaatgcggtaatgcagcgggcttggataaaggaacacttctgcacctgtaagcagtggcgtaaacaggcctaccgtcagcccaaaggagtgaaacagcggtaacgcgctcataaagcgatcgttggtggtgaagtcggcaatcgttttaatctgctcgacattcgccagaatgcttttatggctatggacgacgcctttcggatggccttcagaaccggaggtaaaaaggatcagcgcctcttcttccggctgctgtttaacctgtgccagacgcggcatcagcaaatgagcgaagatccatactttgtcggcagtggtgacatctgcttttaaatcttccagatagacccagcgcacctgagtaagttgctccggcagatgccagagtttgcctttatcgagaaactggcgggaagtgaagatggttttgatttcagccgccgtaatagcactggtcagcccttttaccccggcagtgtagttcatcattgcgggcatgcggcgacgggcgatggccccaaaaatcactgccgcactgatgcctgcattgggcagcattaagccgatgcgttcgccttcaacactgtatttttcaaggatgcgtccaacaaacagcgttttcgtaagcaatttgcgataggagtctggggtaaagttgacgtcttcgacacatttcttcccggctccgaagcggtacattgcactcagtaaagattcgtacagcgtttcacgcgggcgcaccgccattcgcgcttccatcattatttgatgcagcatttcgccagcgattttgcgacggtcacgggcacgcggcgcatccggcatcgccacctgcgttggtggcaaaatatgcagagtaatttgcgggaacaagcgacgtttaaccagacctttcaggcggctgaagtgcgtaagttccgccccttcaatacgcacaggaataaccgttgcaccagacttcgccgcgacaaaacccgcgccatcgtagattttcatcaggctgcctgtcgtggtgatgcgtccttcagggaaaatcaccactggtcggccctgttccaccagacgtaccagatgtttaatagccataggttgcgtcgggtcgagaggaacaaagtcgataaaacttttcagccaacgcatataccactgttggcttatactggtgtaaacggcaaacactggacgcacaggtaaaaacagtccaagcaaaatgccatcaataaaagagacgtgattaggcgtaattagaacgcgctcgcccttcagtgcctgggtgtcacccgtaacgcgaacgcgatacaaaacacggcacaaatttcgaaaaaagctaaaaagcattccaactccctttgctctgattcagtaaaagcgaatggagggagattacacgagataaagaacgcgagcgacagtaaattaggtgcgaaaaaaaacctgcgcatccgcgcaggttggtgcaagagacagggtacgaagagcgtaccgaataatctcaccaatcaatacctctgggatcttgattgtggtctgcacgacgactcttcgccagcgagaaaacgcaaaggaatgaagggaaatgcaacgaggtgtgtaaattgtcggttactgttacagattgatgaccggcaaaaaaaacctgcgcatctgcgcaggctggtgtaattcatgtgctcaacccgaagttgacttcacctatcaatacctctgggatcaccactttagcaacctgaagccaaacgccaccagcggtcaatcgcaacagcgtttcgcaaagtgtaaccaaaggtttgcaatctctttttttgtcttacttatttgcgtttggctcacattcccacgatgaaaacacgccaccccttgaaccaacgggcgttttccgtaacactgaaagaatgtaagcgtttacccactaaggtattttcatggcgaccataaaggatgtagcccgactggcaggcgttagtgtcgccaccgtttcccgcgtcattaataatagtcccaaagccagcgaagcttcccggctggctgtgcatagtgcaatggagtctcttagctatcacccgaacgccaacgcccgtgcgctggcgcagcagaccactgaaacggtcggtctggtcgttggtgatgtttccgatccgtttttcggtgcaatggtgaaagcggtcgaacaggtggcttatcacaccggtaattttttattgattggcaacggttaccacaacgaacaaaaagagcgtcaggccattgagcaactgatccgccatcgctgtgctgcgttggtcgtccatgccaaaatgatcccggatgctgatttagccagtttaatgaaacaaatgcccggtatggtgctgatcaaccgtatcctgcctggctttgaaaaccgttgtattgctctggacgatcgttacggtgcctggctggcaacgcgtcatttaattcagcaaggtcatacccgcattggttatctgtgctctaaccactctatttctgacgccgaagatcgtctgcaagggtattacgatgcccttgctgaaagtggtattgcggccaatgaccggctggtgacatttggcgaaccagacgaaagcggcggcgaacaggcaatgaccgagcttttgggacgaggaagaaatttcactgcggtagcctgttataacgatagtatggcggcgggtgcgatgggcgttctcaatgataatggtattgatgtaccgggtgagattagcttaattggctttgatgatgtgctggtgagtcgctatgtgcgtccgcgcctgaccaccgtgcgttacccaatcgtgacgatggcgacccaggctgccgaactggctttggcgctggcggataatcgccctctcccggaaatcactaatgtctttagtccgacgctggtacgtcgtcatagtgtgagtactccgagcctggaggcaagtcatcatgcaaccagcgactaaccgcagttaaagcaattccagcgccagtaattcttcgatggtctggcgacggcgaatcaaccgcgcctgaccattatcaaacagaacttctggtaacagcggacggctattgtagttggaactcatacttgcgccatatgcccctgtatcatgcagtaccagataatcacctgccttcacttccggcaaggcgcgggtttcaacatttcccccttcctgctgggtaaagacatcgccgctttcacataacggtccggcgacgacggtttccaccgttggcgcgtgttccagagaacgaccatcagctgccagggcactgatatggtggtaactaccgtacattgccgggcgcatcagatcgttgaacccggcatcaaccagcacaaagtggcggctccccatttgtttgacgctccgcacctgagtaattaatacgccagactgcgctaccaggaagcgacccggttcaatttccagtttcacagggtggcccaaatggcgggcgatttgctcacgcgcggcattccacagaccataataatgttcggtatcaaccgcctcttcaccctgttgataaggaacagaaagcccaccgcccgcagaaatagcctgtaaatcctgaccgaattcgatgacctgacgcaccatagcaccacacacctgttccagatgggcataatcaacgccagaaccaatgtgcatgtgaatgccgaccagctgcagatgatgacgttgtatcacgtccagtgcggcgggcagatcggtgtaccagataccgtgcttgctgttttcgccaccggtattggttttttggctatgtccgtgaccaaaccccggattaacgcgcagccatacccgatgccctgggctaacctggcccagttggtcgagcatatcaacagaacccgcattcaccggaatttgcaattcactgacgcgttcaagcgtcgcctgatcgataacatctgccgtaaaaacaatatcatcggggtgcgtttgcggattgtaacccgccgccaacgcacgctctatttcgcctaagctgacggaatccactttcacgccctgctcacgcattaagcgcaaaatatgaatattggaacaggctttctgtgcaaagcgcaccacatcaaactgtttcagcgctgcaatctgccgacgaataatttgcgcatcgtagacccacaccgggcagccaaattcagcgggcaaacgcagcagattttcggcggtgagatcggtatcggtgctgaacagactatgtggcataacaaactccagataagtgcttttttatgattacgccacatcataaaaagaataaaaaatatcgatttatgtcgagtctatgcaaaaatgatatggattaccggattgcgagagagcgctaatggccgccgttaacttacgtcatattgaaatttttcatgcggtaatgaccgccggaagcctgactgaggcggcacacctgctacacaccagtcagccaaccgtcagccgcgaacttgcgcgctttgagaaggtgatcgggctgaaattgtttgagcgcgtacgtgggcgattacatcctaccgtgcaaggactgcgtctgtttgaagaagtgcaacgatcctggtacggactggatcgcattgtcagcgccgcagaaagtctgcgcgagtttcgccagggagaactgtctattgcctgcctgccggtctttagccaatcttttttaccgcagctcctgcaaccctttctggcacgttatcccgatgtcagcttaaatatcgtgccccaggaaagtccgctacttgaagagtggctcagcgcccagcgtcatgatttaggactcactgaaacgctccatacgcctgcgggaacagaacgtaccgaattactctctttagatgaagtgtgtgtgttacctccgggtcatccgctggcggtaaaaaaggtattaacgccggatgattttcagggtgagaactacatcagcctttcccgtactgacagctatcgccagttgctggatcagctatttactgaacatcaggttaaacgacgcatgatcgtagaaacccacagcgccgcgagtgtctgcgcaatggtacgggcgggggtaggtattagcgtggttaacccgctcaccgcactagattatgcggcaagcggtttagtggtgcggcggttcagtattgcggttccgttcaccgtcagcctgatccgccccctgcaccgcccgagtagtgcgctggttcaggcgtttagtgggcatttacaagcggggttaccgaaactggtcacttctcttgacgctattttgagcagtgctacgacagcataattagctcagcataaaagcgacagcatcctcggcatggatcgccgcggtatcaaacacaggcaaaacactgcgctcttctggcaccagtaaaccaatttctgtgcagccaaaaatgacgccctgtgcgccctgttctgcaaggcgagcaatcacttgcgcacaataagcgcgactcgcttcggtaaattgccccagacacagttcttcaaaaataatctgattaattttcgcccgttcatccgcttcaggaataagacaattgatggaaaattgttccgtcagccgcccgcgataaaaatcctgttccatggtgtaacgcgtacccagcagcgccacacgagtcattccggccccggtaattgcacgtccggtggcatccgcaatgtgtaagaaaggcagagtgcaacgactctcaatggcatccgccactttatgcatcgtattggtacatagcacaataccttctgcgcccgcccgctgtaagccaagcgccgcctcagccagaatgtccccggttttatcccattccccgcgacgctggcactcttctatttcatgaaaatcgacgctatgtagcagcacttgcgcagagtgaagcccaccaagccgctgtttaatgccttcatttatcaaacgatagtaaggaatggtggattcccagctcattcctcccagcaaaccaattgttttcattcctctctcctgatgtgtgttaccgcaacaaggctgaataaggaacgagacaaacgcctcaacggccaagtgcccaatctctattaacgaaaaaagggccggatgtacagcacatccggcccgtgaaatcagacgccgatatttctcaacttctcgcctgccatcagtttgcgttcgatatgttccagcgtgacatttttggtttccggaatgagccagaaagtaatgcccacaaacgcaatgttcagcgcagtgtagagccagaacgtaccggcagcgccaatgctatcaagcagtgtcaggaaggtcgcgccgataatcatattgctcacccagttcgtggtggtgctacaggtaataccgaaatcgcggcatttcagcggctgaatttcagagcacaggatccacaccactggcgcggcgctcatcgcataaccggcaatacacatcatcgtcatgccaacagagagccaggacaagccactggaagccgtaccgttatcaaactgcatcaggcaatagcccagcaccagagtgcctaacgccatcacgctgaaaccaattttcagagccggtttacgccctgctttatctaccgtaaacaccgcaataaaggtggcgaacataaaggtcagccctacgaccagagtcgcaatcatctgttgttctgtggtcgtaaagcccgccattttgaagatacgcggcgcgtagtacatgatgatgttcataccggtaaactgctgcatcgcctgcaacaacataccgagaaacacagcacgacggacgttacggttgatcttaaacagtgcccaaccgccctgttttaacttcaggctttcacgaatttcgttgagttcttctcgcgctttttcgctcgtatcgcgcagcatacgcaatacttcttccgcctcaatatgacgccccttttccgccagccagcgcgggctatttggcaggaagactaccagaataatcagcagaactgctggtaaagcaagaacccccaacattgcgcgccagttaccgctataactgaacgctgtatcggataaaaacgccagcacgatgccgagtgtgaccatcaactggtacatactgatcatcttaccgcgaacgttttcacttgccatttcagaaagatacagaggagcggtgtaagacgcgatcccgacagcaatgcccagcaccacacgagcggcgattaacatctctacgctggtcgcaaaagcggaccctatagaaccgagtacaaacaggatggcccccgccatcaggctgtatttacgccccaggcggaagctcagccaaccattaaacagcgcaccaattgctgcaccgagcatcatgctactaaccacccattcctgcaaacgactggtcagcacaaagtgatcggtaatgaacggcaacgctccggcgattacgccgatatcaagaccaaataacaatcctgcgaccgcagcagctacgctaacaaacatattcatacgccgcgtatcccgcaaagaacgtggcgttaaagcagattccgtattgatagtaaccattttttcctgccagcagagagtaagacatagtgaaaaaatacgtgaacaactcacgcaggtgtcaggtcggaaacagcataaatatggattaaattgctgcgacatgtcgttatgtgatggatattccaattttcaaattaagttgaattattgagattattattaaccacctaattttacagcagataaaattcataaagttcattaattgataattaatatggattatttcataaccatgatatggattatgatgatctacaggtataaaaaaccctgccatgcggcagggtcataaaagtaagaagaatgaattaacgcgccagccaaccgccatccacggcaatggtataaccattcacataatcactagcgctggaggcaaggaacactatcggccccatcaggtcactcggcagtccccaacgaccagctggaatgcggtcgagaatttccgcgctacgttgttcatctgcccgtagttgttgagtattgttggtcgccatgtaacccggggctatcgcattaacattaatgttgtgtttagcccattcgttcgccatcaatcgcgtcacacccatcacgccgcttttacttgcggtataagaaggcacacggatcccgccctggaaggagagcatactcgcgatattgataatcttgccgccattgccttgcgcgataaagtgtttcgccgctgcctgagacatgaagaatacgctcttgatattcaggttcatgacatcgtcccagtccttttcgctgaactcgagagcatcttcgcggcgaatcaatccggcgttattcaccaggatatcaatatgaccaaactccgctaccgcgcgatccagcagtgctggaataccatcaatctttcgcagatcggcggtcaggcttaaaaaacgacgccccagcgctgtgacctgctcgatggtttcagtcggttcaacgatgttaatgccaacaatgtcacagcccgcttgcgccagccccaacgccatcccctgacccagtccagtatcacaaccagtgacgaccgcaactttaccttcgagagaaaatgcacttaaaatcataacaataccttattcgtttatgcccacaattagcgcaaatctttaacggccacatggtccatatcatcaaagacctggttttcaccgaccatgccccagataaaggtataagctttggttccgacaccggaatggatgctccagctcggggagatcaccgcctgctcgttatgcatcacaatatgacgcgtttcttgcggctgccccatcatgtggaaaacgcaggcgtcatcatccatattgaaatagaaataaacttccatccggcgctcgtgggtgtgacacggcatggtgttccacaagttacccggagccagctccgtcagccccatactcaattggcaggtttccagtacatccgggacaaaatatttgttaatcgtgcgacggttactggtgaggttatcgcctaacgtgactggagatacttcgtccggtgtgacttttttggtgggatacgtcgtatgcgcgggtgcgcaattgtaataaaacttcgccggagtgccggtatcaatactggcaaagacaacttcttttgcacctttaccaacatacagggcgtcgcggtgaccgatttcatagcattggccatcgacagtaatcgtaccggcaccgccaatattgataacacctaactcgcgacgttcaaggaaatagcttacgccgagttgtttaccaacttccccgccaacggaaaccgttttagttatcggcataatgccgccaacaataattcggtcaatgtggctgtaaaccatggtgtactcatcggcgacaaataccttttcaaccaaaaattcattgcgcagcccttgggtatccagcgtttttgcgtgcgcactgtggatgctctgtcttacgtccacatcaacctccgataatcagtgaagcgtgaaaatagaaaacgatagtgaaacactgtttcgttttctctataaagggatgatatgcccatgggctagggttttcaattaaaaataaaacaatgtttcatttttaagttaaggattaaaaaaagtgcagtgtcgatcacgaatatgtcatgagaatggaaaaatgagggagcccagaaaatgtatgtcgacttgccagccatcattattcaacagattaatgacggcagatatttatcggtaaggaggaaatgcagagttattcgtcacgttcaatggtcaatgccacaccctggcccccgccgatacaaagcgttgccagtcctttgcgggcattacgtttcaccatttcatgaaccagagaaaccaggattcggcaaccggaagcgcctatcgggtgaccgagtgcgatcgcgccaccattgacattgacccgacgctcatcccactcaagcatcttgccaacgctaagcgcctgtgcagcaaacgcttcattagcctcgataagatcgacttcagccaactgccagcctacacgctccaggcaacggcgggtcgcatacaccggcgcaattcccatcaatgccggatctacaccaacgctggcaaatgcgcgaatgcgggccagcacgggtaaattcaacgctcgtgctttggcttcgctcatcatcattaccgcagctgcgccatcgtttatggaacttgcattacccgctgtcacagaaccgagactatcaaaactaggatttaaacgggctaagccttctgcgctggcgtcagtgcgtggctgttcatcggtatcaacaaccaacgtctgcccgttactttgggtcattaccgggacgatctcatctttaaatcgtccggcgtcaatcgccgctcgcgctttttgttggctgctaagtgcgtaagcatcctgcaactgacggctgatgccatattcgcgagccagattttcggcggtgacaccaatatgataatcattgaaggcatcccacaacccatcatgcacaagactgtcaaccaactggctattgccaagctgtgcaccggtgcggctatcagtcagaacatgtggtgcgcggctcatgttttcctggccaccggcgatgacaatatcagcctcgccacactgtatcgcctgagtagccagatgcagtgctttaagcccggaaccgcaaacgtcattaatagtgattgcagaaacgctattaggcagaccacctttaatagcgctttgccttgccggattctgccctgcccctgcagtcaacacctgaccaagaattacttcatccaccgcatatgcaggaacgccggtacgttctattaacgctttcacgaccagactaccaagttccacggcggaatgacccgctaacgcaccacgaaagcagccgataggtgtccgtaacgccccgacaatcacaacgtctttcatcacaacctcgcaccaattaacagtgcaatagtaaatgattgttaattacagttatcttaattgtttaaaaaaagtgatttttatcacaaaggaaatatgcctgagcagcagtcagagacataactggcacgtaaggtttgcaaccactaacccaccaatagaggggtagatagggcgttaatctcccatacttaacctggtttatggtaaattgccctccattttgtttaatttgtagatgatacgttcagataatgtctaatatttggtctaaagaagaaactctgtggagtttcgcgctctacggcacagccgttggtgcaggcacgctcttccttcctattcagttaggtagcgcaggggctgtggtcctgtttattactgctctggtcgcctggcctttaacatattggccacataaagccttgtgccagttcatcctcagtagtaaaacaagtgcaggtgaagggataacgggcgcggtaacacactactatggcaagaagattggtaatctgattaccacgctgtacttcatcgccttttttgtcgtcgtgttgatatatgcagtggcaattaccaacagtcttacggaacagctggcaaagcatatggttattgatcttcgcatccgtatgttggtgagtctgggtgttgtattaattctgaatctcatttttctgatgggacgtcatgccactattcgggtaatgggatttttggtattcccattgattgcctatttcttatttctttccatttaccttgtcggtagttggcaacctgatctattaacaacccaggtagagttcaatcagaatacccttcaccagatatggataagcattcccgtgatggttttcgcctttagccatacgcccattatttctacgtttgccatagacagacgtgaaaaatatggcgaacacgctatggataaatgcaaaaaaattatgaaagtcgcttatctcatcatctgcataagtgtactgttctttgtctttagctgcctgctttctattccacctagctatattgaagctgctaaagaagaaggggtcaccattttaagcgcgctttctatgctgccgaacgccccagcatggttgagtatttccgggattattgtcgcagtagttgcgatgagcaaaagtttcctgggtacgtactttggcgttattgaaggtgccacagaggtcgtcaaaacaacactacagcaggttggtgtaaagaaaagtcgtgcatttaaccgcgcactaagtattatgttggtaagcctgattaccttcattgtttgttgcattaacccgaacgcgattagcatgatttacgcgatcagcggcccgctcattgccatgatacttttcatcatgcctacgctgagtacgtatctcatcccggcgcttaaaccctggcgttccatcggaaatctgattacgctgatcgtgggtatcctgtgcgtaagcgtaatgttctttagctaatatcagttgtggatggttcaaaattgctacaattttgaaccattccatttttcataatattcatttgttattattccaccctatcacttctctcgtcatatcctagtattatcagttagttaaacacacaaagagatctgaacatcttaaataagactatttaagatgcataacttagattcgcaagatatcttctggtcattcaaaaacaatttgcgatatagatattcttataccatgagatagttatctggaccgctctcaaccatgcaagattaaatcagtgaaacataatcatatttgataacgagaaatgcatttttaaatgccttactcagaattatagcaaatacagattaatcgcaatttttcccggcaaaattacaaaatcatggtgtattgacatcatcaataaccaatgaaattatgcaattatatacggatagggaggttcttaacatggggctttgtagtcgttataaaagtcttacatgcaatagttgcagtatgcattgccaaataatgccagaagagagtccgcgtttgcagtattgcgcaaacagctgtttttgtatgtggcccgaagaaagtagttattttaatcgtggtgtggtagaaggtatcttaacaaaaaaccacaatgcgagattaagcggatatatttttgtcgattttagtgtaagttttttacgtctattccttgaaaaagactggattgactatcttgcaagtactgacatggggattgttttagtcagcgaccgcaatatgcaaagcttagctaattactggcgaaaacacaacagtgcaatatctgctgtcatatataatgatgatggtcttgatgttgccaatgaaaagatcagacaactatttattggtcgttatttaagttttaccggaggtaacacattaactcagatggaattcaccataatggggtatatggtttctggttataatccatatcagattgctgaagttctggatatggatatccgtagcatctacgcgtacaagcaacgaatcgaaaagagaatgggtggtaaaataaacgaattatttattcgtagtcatagcgtccaacattgatactcaacgaccagccagaatcatactctgtttatacgggcatttattgaaatgtccgtattttataaataggccgtcccctcaagagtaaacaccatagtatttaaaaccatcacacgaaaaattcagaagcattacgaaatatgaatttacaaacaatagtggcataaatgttaaccatgttaatttacgtaaagttttacgttgcaacattaaagcctcatttcaatcatcatgataaatataaaattaatatatatttatgccgtaaataccaatatacttagcaaactatgtgatctccatttcgattgatttagtgtttattgacgtatgtactggattattaacgataatatcgagttctggcctgagcaccgaaaattaataagcgtacataacgccgatcttaacgtcgttctgacaacgccagccagtcgatgtttaagtcttctacttgaagcttttcctgatgtggttgcacaacaagattttttcaccagagtctgggaagaagaaggtatgcgtgtgcctactaacacgttatatcagaacatatccattatcagacgcggatttcgcgctgttggtgatactacccacagcctaattgcaaccgtgccgagaagaggattcaagatccataatgacattaacatacaaaatcatgtaataaacagcagtacagacgcacatacacacaatgccccacctgccataaaagttaatgcgggatacaaagagagcattggtggcgcaaagaatttcaataacaaaatcctcaaacatataaaaagtcatctaattatgttgagcgcatttgtcataggcgcatattctgcatattggctatggaataataatcaaccgaagccatttttcaaggattacaagactgttgcggaaattaatggctgccattttaatgtaacagaagatacaattgatgggttgaaagagttcgataaatataaaacacggatactggatagcgggattaactgtaaaaaacatccgtggttatacttccctcttgcaaaatccagtccggggatgattgttatggcatgcaataaaaactataaccaacatgaagtggcaaactgtttaaccctgtcttaccgtgaggttaatcgtgattgattataaaaaaaacttattatttattttagtttttatcagtgggtttattctcttcactgtctattcttacactgcagaaaaaatgatatataacgaaacatgcactgcaaattgggtaatttttaatgaccagggacgagcaaatcttaccatcgactttatgtataacaaaaaaaataaaacaggaactgttgcgttgagtggaacctggcaacaaggtaacagagaaagtaaaagtatacggcgaaatattgaatacacatggattgaaaactatgacacagcccatttaacaagtaagaaagttaataagtttgagattatggatcaagttgatgatgatagacttgcacaacttattcctgatttttatgtctttccagaaaaaagtgtaagctataatatactaaagcaaggtaagcatgcttttattttgagcattggtaacagagcaataatgcattgtgcaaggtaaactaaaatagataacaaaaagatggaacctcgttaatcataaaacaataaaattaaatattctcgcagtatatggcagtctaaagcatcaaagatttgatcaacatctttcattttagacatctccttgcaatgtaaaatatcatgtatcaacaacatctggtgcaaatccaactgtcgaactcgacattcatcttagctcgattattattccttcgtacagtgcttgtaaacaatacagaaagaggattattaagaaccagtttactcagactatcaatagaggaaaggactaacgtttctttaaaagaattgatttcatcatctgttaaactaaactcatcattgacagatcgactgatataactgtttttaactttactctttacgttgactttattgacagaattaacattcacatatctactatttaatgtccaacttgttgtttgcgtgagaacattctcagcattaaggaatttttttaacggaatccttggtttctttttgctgtcgctatttacaatatcatgcatatagaccatttcatgaatctggctaaattcaatgtccattgtatacctcacatttttaccgtgactcgatgttactgttcaataatcaccttccatcaatactaaaattaatacccctaatgtgccgataacaaatatagtcattctacgtaacgtctccataaggtgatatttgacattatcagaagctgcgaattcggattttgctctaatcaaatgagagaaatgtaaaatgaagccacgaaatattaataatagcctaccactgcaaccattagttcctgatcaggagaacaaaaataagaaaaatgaagagaaatccgttaatccagttaaaatcacaatggggtctggtttaaattatattgaacaagaatctcttggaggaaaatatctaacacatgatttgagtataaagatagcggatatttctgaagagataattcagcaagcaatattatctgctatgagcatatataaatttagcataacagatgatttaatgagtatggctgtaaatgaactcataaaactgaccaaaatagagaataatgtagacctgaataaattcactactatatgcacagacgttctatccccccgcgtcaccagacataataaagaaaaaaacaaacgacattctacccttctcaaaaatcccctttttaattttcattgaaaaaatggcaattgatactatgaatccaggtcatacacattaaggcatttatgtaatgtcgtaattaagataactaataaggtgaatattagtaaaacaactaatgatgttattagtttgtagtgaacagtacttttaccaataatgaaaaatataccataagcaatgcaagcttaaaactcataatttaaaaaagataaatataaaaatatcaatgagtcaatcaataataatttggcatcacgagacacatcacagaggaatattatgagcacagaaacaattgaaatattcaataatagtgatgaatgggcaaatcaactaaaacacgcattaagcaaaggagaaaatctggcattactacatggtttaactcctgatatccttgatagaatatatgcatatgcattcgactaccatgaaaagggtaatataacggacgcagaaatttattataaattcttgtgcatttatgcgttcgaaaatcatgagtatctaaaagattttgcaagtgtatgtcagcccaaaaagaaatatcaacaagcatatgacctttacaaactaagttacaattacttcccgtatgatgactatagtgttatttatcgtatgggtcaatgtcagattggggctaaaaatatcgataacgcaatgcaatgtttctatcacattattaacaattgtgaggatgatagtgttaagagtaaagcgcaggcatatattgaactcttaaacgataatagtgaagataatggctaagcattacaatcatttggttaaatttgctggttatagtgcagttaaccactataaccagcacctcttatgttttcttaaatcagcatcttaaaacagttaagagcatactataaatcattatttttcaatgcgttagagaacaatctactttatcaaaattgaataaggctatttcagattacatcactgaattcctaagataaattagtgaacacaaccatagatatgtcaaatgtaatttcctgtagcgttaatgacacataaatatgaatagccataatttctattgcttaagcaggatgcaagaaaccaattttttcatagaggttaactaatggacttagaaaataaattcagttatcattttcttgagggattaacgctcacggaagatggaattcttactcaaggaaatgagcaagtttatattccacagaaagagttaggtgtattaatagtattacttgaatccgctggtcatgttgtactgaaagatatgatcatcgaaagtgtatggaaaaatattattgttagtgacgagtccctgacaagatgtatctattctttgcgctgcatttttgaaaaaattggctatgatcgttgcatagaaacaatctaccggaaaggttatcgtttcagcgggcaggttttcaaaactaaaattaatgaagataatactagtgactattccatagctatattccctttcactactagtttgaatacactggatccattaatacttaatcaggaattagtgcaaatcattagtaataaaaaaatcgatggtctctatacctatccgatggctgcgacaaatttttgtaatgatcacatatctcaaaatagtttcttgagcagattcaagccagattatttcgttacaggaagaataaaccagaataatgcagtgaacactttatacattgagttgatcgacgctaaaaaccttttcctcatcgccagtaatcatctccctgttgatgaactacataatacaagtcaatttattatagataatatccttcaaacggtacataaaccagaacgatctgtaagattagctaagcaggaccaaggatataagaatcattatttaagtgatgaaatgttagccggaaagaaagaactttacgacttcacccctgaaagcatttacagggccatgactatatttgatagattacaaaataaaagtgatatacagacgctaaaaacagaatgttattgccttctagcggaatgccatatgtctttggcacttcatggaaaaagtgaacttgaacttgctgctcaaaaagcattagagcttttagattatgtaagtgacataaccactgtcgatggaaaaattttagctattatgggactgataactggtctgtctggacaagcaaaagtatctcatatcttatttgaacaggctaagatacacagtactgatatagcctctctctactactatagggcactagtccactttcataatgaaaaaattgaagaggcaaggatttgtatagacaaaagtctacaactcgaacccagaagacgaaaagcagttgtgataaaagaatgtgtagatatgtatgtgcctaacccgctcaaaaacaacattaaactctactataaagaaactgagagtgaaagccatcgagttataattgacaacattttgaaattaaagcagctgacgagaatttgtatgcgataaatttttattgacgcaattttattatttagatgtatgcaacttgttatttaaacaacagagataaaaatatctaagatattcaccttattgcaagatatttaaaatgctctagagttaaaagtatgatgtaaagaccattggcctggacaattaaaaaagggagctttatgactaatccaatcggtatcaataatttatctcaaagtagtaatatagcgaatgcaacgggtgatgaagtcgtaagtttagataaacacatcaacaccagtgctactgatacagatcaaatacaagcatttatagttagtacatggatggcgccttttcaaaatgatatgtatagtgaagataatcctatcagtccttactataaaattgagtggtaaacgattgaccaaataaatcataacgagatacttttataatagtatctcgttcctttcattcaatcctcacacatgaaaaaatatgcgctcaccaaaagttaaattcttaaccatcttcacgttttgtatatttattacaaaaatgtctttcgccagcaactcttgctctaatgaagcaggaacaatgttcagaatcgaaccaaatttaattaaagctatcgctcttgttgaaagcaatctaaaaaaggatagcataggcaagaacagagataagaataacaatataaagagtttagattattggttaatgcagataaaccagatgcatattcccctgttaaaaaaacgtggaataataaaagatgaacgagatttgttagataacccttgtctgaacattaaaataggaaccgagattttatataaccattttagtcgttgtggagtaacgtggcaatgcctggggacttataatgcgggttttgcaatggataaccaaaaaaagagacagcaatatgccccaaaatatatattgtatataccaggcttaatgaactaaacaatcgtaaggcttcagcaaaatgagcctaaagcctcttttttttatatagtgcaaacacccatacgtaaagctgttttgatcaactcgataccactgtgaacatctaatttcttcatgatattgagtctatgagtttcgactgttttcctgcttaactgcaagaaattagcgatttctttgtttgttttaccatcagctatgagttgtaatatttcactctcacgatttgtaagttgattatcagaggaatacctggaagatattttttcacaatccatatgtacactatcaaaataagtgtaaccattactaatgctatcaatagcacgatttagtttcgccgggtgactggttttccatacgcatcctttcgcacctgcttcaagcaattttatactatcaatatacggcatctttgctacaaatgtaataatatgagcatctatcttatggcttttaacccattttacgagttcggcccccatcattccacctgcaaattctcctaaaataaatatttaggctgtagatttgttacactccgctatagctttcttcagatctttatagcccacttatttaacaacttgaaaataaggtgttttacctgggttgttacaaaaggattgcattgcgtaaacgctttttatttacaacaaaatggggaagtattacggcgaagataaattggagcgggcgaagggaatcgaaccctcgtatagagcttgggaagctctcgttctaccattgaactacgcccgcttcgagatgcgtaaggcattataaaccttacgctctccttagcaagtgccacgctgctgactgctgattaattcgccatcagcattttggcttgctgccctgaggcggcaagtaacgtagcggatcaattgccgttgcacggtaacgaatctggaaatgcaggcgaacagatgccgcatccgtgctccccatagtggcgattttttgcccagccttcacgctttgcccattatttaccagcatcgtgtcattatgggcgtaagccgtaatgtaatcttcactgtgtttaatcatgatgagattaccgtagccacgcagctggttgcccacatacaccacctttcctgcacccgcggcgtaaataggtgtaccccgtggagcactgatatcaatccctttattgccgccatctgctgtgctatacggcatgataactttccctgtcgttggccataaccaacaacgttgccctactggcggccaggaacttttcggtaccgcactactcggtgtaacgcttgcggttttggtcgtacttttggcggtacttttacgtgtaatactgctacttttcgccccacccagttttagtttctgaccaacttcaatggtgtaagggggggaaatgccgttcagtcgcgccagttcttttacgctggttcccgtggtgcggctaatacgatatagcgtatccccccgtttcacggtgtaaacggagccggaatacgttcctgtatcggaacttttgctaccgctacagcccgccaaaagcagtccaacgcttaacaacatcacgatacccagagattttttattcaggcgtcccgcactcaaaatctttcctcgcttaaaaaacaagacgccttatcatagcagccagcctcttgatacccaatctcttgcttctggaaaaacgtggtaatagagaaagaggttaatttcatttggcaaagggaagtatcatcagcaaaatattcgctgtagaggtatcgaacttcctgactttttaccctatttcccatcctgatgcgtaataatcccaatttatcacattgattttatcgccactcatattgatacgtatcactgcccctattcagagtcctgtttcgtatcatatctgtgtttttttaacgtcatcacacttcctacctcccctaacgcttatcgtcgtttctggcgtaaatcttgcctgcttagactaaatctttgccataagaaccaaatgttcaaatcgaggggatttctatggaagcgcgggaagcaaccgctacgggtgaatcatgcatgcgcgtcgatgccattgctaaggtcaccgggcgggcacgatatactgacgattatgttatggcgggcatgtgttatgcgaaatatgtacgtagccctatcgcacatggttatgccgtaagtattaatgatgaacaagccagaagtttgccgggcgtactggcgatttttacctgggaagatgtgcctgatattccattcgctacagctgggcatgcctggacacttgacgaaaacaagcgcgataccgccgatcgcgcactgctaactcgccatgttcgtcatcatggtgacgccgttgccatcgtcgtggcccgcgatgaactcacggcagaaaaagcggcgcaattggtcagcattgagtggcaagaattacccgttatcaccacgccagaagcggcgctggcagaagacgctgcaccaatccataacggtggcaatttactgaaacaaagcacgatgagcacgggtaatgtccaacaaacaatcgatgccgccgactaccaggtacaggggcactatcagacccccgttattcaacattgtcacatggaaagcgtaacaagcctggcgtggatggaggatgacagccgaattaccatcgtttccagcacccagatcccgcacattgttcgccgcgtggttggtcaggcgctggatattccctggagttgcgtacgagtcatcaaaccatttgtcggtggcggttttggtaataaacaggatgtactggaagagccaatggcggcattcctgaccagcaagcttggcggcattccggtgaaagtttcccttagccgtgaagagtgtttcctcgcaacccgtacccgccacgcttttaccattgacgggcaaatgggcgtgaaccgcgacggaacattgaaaggttatagtctggatgttctgtctaacaccggcgcttatgcatctcacgggcactccatcgcttctgcgggggggaataaagtcgcttacctttatcctcgttgtgcctacgcttacagtagtaagacctgctataccaacctccccagcgctggtgcgatgcgtggttatggcgcgccacaagtcgtatttgccgttgagtctatgcttgatgacgccgcgacagcgttaggtattgatcctgttgaaattcgtttacgcaacgccgcccgcgaaggagatgctaatccgctcacgggcaaacgtatttacagcgcagggttgccggagtgtcttgaaaaaggccggaaaatctttgaatgggaaaaacgccgtgcagaatgccagaaccagcaaggcaatttgcgccgcggcgttggcgtcgcctgttttagctacacctctaacacctggcctgtcggcgtagaaatagcaggcgcgcgccttctgatgaatcaggatggaaccatcaacgtgcaaagcggcgcgacggaaatcggtcagggtgccgacaccgtcttcagccaaatggtggcagaaaccgtgggggttccggtcagcgacgttcgcgttattagtactcaagataccgacgttacgccgttcgatcccggcgcatttgccagtcgccagagctatgttgccgcgcctgcgctgcgcagtgcggcactattattaaaagagaaaatcatcgctcacgccgcagtcatgctacatcagagtgcgatgaatctgaccctgataaaaggccatatcgtgctggttgaacgaccggaagagccgttaatgagcttaaaagatttggcgatggacgctttctaccaccctgaacgcggcgggcagctctctgctgaaagctccatcaaaaccaccactaacccaccggcgtttggctgtacctttgttgatctgacggtcgatattgcgctgtgcaaagtcaccatcaaccgcatcctcaacgttcatgatagtgggcatattcttaatccactgctggcagaaggtcaggtacacggcggaatgggaatgggcattggctgggcgctatttgaagagatgatcatcgatgctaaaagcggcgtggtccgtaaccccaatctgctggattacaaaatgccgaccatgccggatctgccacaactggaaagcgcgttcgtcgaaatcaatgagccgcaatccgcatacggacataagagtctgggtgagccaccaataattcctgttgccgctgctattcgtaacgcggtgaagatggctaccggtgttgcaatcaatacactgccgctgacgccaaaacggttatatgaagagttccatctggcaggattgatttgaggataacatcatgtttgattttgcttcttaccatcgcgcagcaacccttgccgatgccatcaacctgctggctgacaacccgcaggccaaactgctcgccggtggcactgacgtactgattcagctccaccatcacaatgaccgttatcgccatattgttgatattcataatctggcggagctgcggggaattacgctggcggaagatggcagcctacgtatcggctctgcaacgacatttacccagctaatagaagatcctataactcaacgtcatctcccggcgttatgtgctgcggccacgtccattgctggaccgcagatccgtaacgtcgctacctacggtggaaatatttgcaacggtgccaccagcgcagattctgccacgccaacgctaatttatgacgcgaaactggagatccactccccgcgcggtgttcgtttcgtcccgattaatggctttcacaccgggccgggcaaagtgtctcttgagcatgacgaaatcctcgtcgcctttcattttccgccacagccgaaagaacacgcgggcagcgcgcattttaaatatgccatgcgcgacgcaatggatattagtacgattggctgcgccgcacattgccgactggataacggcaatttcagcgaattacgcctggcatttggtgttgccgcgccaacgccgattcgctgccaacatgccgaacagactgcacaaaatgcgccattaaacctgcaaacgctggaagctatcagcgaatctgtcctgcaagatgtcgccccgcgttctagttggcgggccagtaaagagtttcgtctgcatctcatccagacgatgaccaaaaaagtgattagcgaagccgtcgccgcggcggggggaaaattgcaatgaatcacagcgaaacaattaccatcgaatgcaccattaacgggatgccttttcagcttcacgccgcaccaggcacgccgctcagcgaattactccgcgaacaaggactgctaagtgtcaaacaagggtgctgcgtgggtgaatgtggtgcctgtacggtgttggtcgacggcacagcaatagacagttgcttataccttgccgcctgggctgaaggaaaagagatccgcacgctggaaggtgaagcgaaaggcggaaaactttctcatgttcagcaggcttatgcgaaatccggcgcagtgcagtgcgggttttgtacgcctggcctgattatggctaccacggcaatgctggcgaaaccacgcgagaagccattaaccattacggaaattcgtcgcggactggcgggaaatctttgtcgctgcacggggtatcagatgattgtaaatacagttctggattgcgagaaaacgaagtaaaaggatatccggcctgaattcaggccggattcactgaggttatgtgtttaacaactcatatttcttaatcttgcgatagagcgtagcaatgccgatgcccagttcatcagcaacttgcttcttgctgttatgacgactaagcgcctcgcggatcatttgcttttccatctcctccagcgccgtgccgcccgcatcatcgagactcaggtgcgcctcactgacctctgttacatcactttgctccgttgtgccattattcagcagatttggcggcaatagcgtgctgtcgataacttcaccactaggaaccacgttaaccagatattccatcaaattgcttaactcgcgcaggtttccgggccaacgatgcttacgcaatatttcgacgacatcgggagcaatgccaggataaacgcttcccagacgacgggtatgcagatgtaaaaagtaatgcaccaatagttcaatatcttcctgacgttcacgcagcggtggcagagttatcgggataacattaagtcggtagaagagatcttcgcggaatttaccttcggcaatgaactgggccaaattctgattagttgcagaaatgatgcgaatgtcgacttgtattgggctactggcaccaatcggcagaatttcacgtgcctcaatagcgcgcagtaatttagcctgcaacattaatggcatatcacctatttcatcgagaaacagcgtgcccgtattcgccgcctgaatcaaccctgttttaccgttggcagaagcgccagtaaatgcacctttaacataaccgaacagttcgctctccagaagctgctccggaatcgcggcacagttgatagcaataaagggtttattccgtcttccgctcaacttatggattgcacgggcgacgacttctttacccgtgccgctttcaccaaccaccataacgctggatgggctgggtgcaatacggctaatgagtcgttttaattgccgcataacacggcactcgccaaccaattgttcaatatgcggttcatcaggtgcatttgctacagaaaaactggtatggctttggtgaaacgccattaaaaataattgtcggccctgaatgttatgcaattgaccaatgattaattcacttttatcgtcccaactaacaatatgctgcatatgtccatgggtaaaattactctcaaatgttaatggtctgaaacggataggtttcccaataatattattttgcacaacaccaagtgtttttaaggcagtctgattaacaaactgaacccgattttcatcatctacaactaatacgccctgatccatattatcgatcatggtcgcaaatattttactgatgttatctcctggcccctgatcctccagaagtttgctaacaaaaatggtggatatatggcgaacataatcagaaaattcgcgtaaattatcactgatatgctcttgttgctcgtgggtaacggcaatcaaacttatcaccccaacacaacgatcctgtaaaatgacaggcgtacccagaaatgctttttcgcggcaattttctttactatcgcaaccttcgcaaaggggatcgaagcgagactgtgtcacaactttttcagttttcgtttccaggacgtggcggagcaggcgactgttgccgctcaactggcgaccaagaaacttcccatacgcgcccgttccggcaacgcgacacaagttttcatcaacgatctcaacctcaagctgcaaaaacgctggcaagcattctggcaaaacgctgaattgtcggttgaatttgcatcaatacactctgcgtagtagcaagctccatagctttaccttccagacttacttaaaagtcgatcattgaagacgttgatggttcacagatcatgatgatattaactcaggcgaaattggctttgataaaaacataagatttttatcattttctaatgaaattatggaagagatatcacatttctatatcaatatgagaattacggcggtgagtttatcaaactgaagagagatagcctgcccctttatcttatttctgatacttagcagcaaataaataacgcgataaaaaaagccaaacgttttcgtattttacaaacaaccagaagctggcatcaatttgtgatcaaccccacacattatccgtcaaattagtcttttgcagccgcgcggataattctggcacacttattgttagtcccaggtatagctgtgaaaacaccaatcactttggcaagtcacagtgaaataaaccactttgcctgtcattccactaccgggactttatgatgaaaactgttaatgagctgattaaggatatcaatagcctgacctctcaccttcacgagaaagattttttgttaacgtgggaacagacgccagatgaactgaaacaagtactggacgttgccgcagcattaaaagcactgcgtgctgaaaacatcagtaccaaagtctttaatagtggattaggtatttccgtattccgcgacaactccacccgtacccgcttctcttatgcttccgcgcttaacctgctcggccttgcacaacaagatctcgacgaaggcaaaagtcaaatcgctcacggcgaaaccgtgcgtgaaaccgccaatatgatctccttctgcgccgacgctattggtattcgcgacgatatgtatctgggcgcaggcaacgcctatatgcgtgaagttggcgctgcacttgatgacggttacaagcagggtgtactgccacagcgtccggctttagtgaacctgcaatgcgatattgaccacccgactcagagtatggctgacctcgcgtggttacgtgaacactttggtagtctggaaaacctgaaaggtaaaaaaatcgccatgacctgggcctactctccaagctatggcaaaccgctctctgtaccacaaggcatcatcggtctgatgactcgcttcggtatggatgtcaccctggcccatccggaaggctacgacctgatcccggatgtggttgaagtggcgaaaaacaatgctaaagcctccggtggtagcttccgtcaggtcaccagcatggaagaagccttcaaagacgcagacatcgtttatccgaagagttgggcaccttacaaagtgatggaagagcgtactgaattgctgcgtgcgaacgatcacgaaggcttaaaagcactggaaaaacagtgtctggcacagaacgcgcaacacaaagactggcattgtactgaagagatgatggaactgacccgtgatggcgaagccctgtacatgcactgcctgccagctgatatcagcggcgtatcctgtaaagaaggtgaagtgactgaaggcgtattcgaaaaataccgtatcgctacctacaaagaagccagctggaagccttatatcatcgccgcgatgatcctgtcccgtaaatacgccaaaccaggtgcactgctcgagcaactgctgaaagaagcgcaagaacgcgtgaaataacccctcgggccgatcagctggtcggccctctatttccagaggccaaaaggataggatatgtccgttttcagtttgaagattgatatcgccgataacaaatttttcaacggcgaaacaagtccgctctttagccaaagccaggccaaactggcgcgccagttccaccagaaaatagctggttatcgcccaacaccgctttgtgcgctggacgatctcgcaaacctttttggtgtgaagaaaattctcgtcaaagacgaaagtaaacgattcggtctgaacgccttcaaaatgcttggcggtgcgtacgccatcgctcaattattgtgtgaaaaatatcatcttgatatcgaaacgctgagttttgagcacctgaaaaatgccatcggcgaaaaaatgactttcgcgaccaccaccgacggcaaccacgggcgcggtgtggcgtgggcagcacagcaactcggacagaatgcggtgatttacatgccgaaaggttctgctcaggaacgcgttgacgccattctgaacctcggtgccgagtgcatcgtcacggatatgaactatgacgataccgttcgcctgaccatgcaacacgcgcagcagcacggctgggaagtggtacaggacacggcatgggaaggttacaccaaaatcccaacctggatcatgcaaggctacgcaaccctggcagatgaagccgtcgagcaaatgcgtgaaatgggcgtaaccccgacgcacgttctgctgcaagccggtgtcggagcaatggccggtggtgtgctgggttatctggtcgacgtctatagcccgcaaaatctgcacagcattattgttgaacctgacaaagctgactgtatttatcgctccggcgtcaaaggcgacatcgtcaacgttggcggtgatatggccaccatcatggcaggcctggcctgtggcgaacctaacccgctgggctgggaaatcctacgtaactgcgccacccaattcatctcctgccaggacagcgttgccgcattaggtatgcgcgtgctgggtaatccgtacggcaacgacccgcgcatcatctccggtgaatccggcgctgtcggtttgggcgttctcgcagcggttcattatcacccgcaacgtcaaagcctgatggaaaaactggcgctgaacaaagatgccgtggtgctggttatcagcactgaaggcgacaccgacgtgaagcactaccgcgaagttgtctgggaaggcaaacacgctgtagcaccttaatcaccctattggaactgctccctgcaaaacggggagtaaaaaatctggagaaaaataatggctaagaatattccattcaaactgattcttgaaaaagcaaaagattaccaggcggatatgactcgcttcctgcgcgacatggttgctattcccagtgaaagctgcgacgagaaacgcgtagtacatcgtattaaagaagagatggaaaaagtcggcttcgataaagttgaaatcgacccgatgggcaacgttctcggttatatcggccacggcccgcgtctggtggcaatggacgctcatatcgataccgtcggcattggcaacatcaaaaactgggacttcgatccgtacgaaggcatggaaactgatgaactgattggtggtcgcggtacttccgaccaggaaggtggcatggcctctatggtttatgccggtaaaatcattaaagacctcggtctggaagatgaatataccctgctggttaccggtacggtgcaggaagaagactgcgacggtctgtgctggcagtacattattgaacaatccggcattcgcccggaatttgtggtcagtaccgaaccaaccgactgccaggtataccgtggtcagcgcggtcgtatggaaattcgtattgatgttcagggtgttagctgccacggttctgcaccagaacgcggtgataacgccattttcaaaatgggtccgattcttggcgaattacaagaactctcccaacgtctgggttatgacgaattcctcggcaaaggcaccctcaccgtttctgaaatcttcttcacatccccaagccgttgcgctgtagcagacagctgcgcagttagtatcgaccgtcgtctgacctggggcgaaacctgggaaggcgcgctggacgaaatccgcgccctgcctgcagtacagaaagctaacgcggttgtttctatgtacaactacgaccgtccgtcctggactggcctggtttacccaaccgaatgctacttcccgacctggaaagtggaagaagatcacttcaccgttaaagcactggtgaatgcctacgaagggctgtttggcaaagcgccggttgttgataagtggaccttcagtactaacggcgtatctatcatgggccgtcacggcattccggtgatcggctttggcccgggtaaagaacctgaagcgcatgcacctaacgaaaaaacctggaaatctcacctggtgacctgtgccgcgatgtacgctgcaatcccgttaagctggctggcaacagagtaattactcttcacttattcccctccggttcgccggagggtttttggagtttgctatgcgcgtattgatcaaaaacggcactgtcgttaacgcagatggacaagccaaacaggatttgctgattgaaagcgggattgttcgccagttgggcaacaatattagcccgcagctcccgtatgaagaaattgatgccactggctgttacgttttccctggcggcgtggatgtccatacgcatttcaatattgatgtcggcatcgcgcgcagttgtgatgatttttttaccggtacccgcgcagctgcgtgtggcggtacaacaaccattattgaccatatgggatttggcccaaacggctgtcggttacgccatcaactggaggtttatcgtggttatgccgcccataaagcggtcatcgattacagctttcacggtgtgatccagcacattaatcacgcaatcctcgacgaaatcccgatgatagtcgaggaaggactgagcagttttaaactctatttaacctatcaatacaaactcaacgatgacgaggttttgcaggcattacgccgcttgcatgaatccggcgcgctgaccaccgtgcacccggaaaatgatgcggctatcgccagcaagcgggcggaatttatcgccgcagggttaaccgcgccgcgctatcatgccttgagtcgccctctggaatgcgaagcggaagccatcgcccgcatgattaacctggcacaaattgccggtaacgccccgctctatatcgtgcacctgtctaacggcttaggtctggattatctgcgtcttgcccgtgcgaatcaccagccagtctgggttgaaacctgcccacaatatctcctgttggacgaacgcagttacgatacagaagatggcatgaagttcattcttagcccaccgctgcgtaacgtacgcgagcaggacaaactgtggtgtggcatcagcgatggtgcgattgacgtggtggcaaccgatcactgcaccttcagcatggctcaacgcctgcaaatttctaaaggcgatttcagtcgctgcccaaatggcttacccggtgtggaaaaccgcatgcagttactgttttccagtggcgtgatgacgggacgtataacaccggaacgctttgttgaattaaccagcgcaatgcccgccaggttgtttggcctgtggccgcaaaaaggattattagcgcccggttccgacggcgacgtggtgattatcgacccacgtcagagccaacaaattcagcatcgccatctccacgacaacgccgactacagcccatgggagggttttacctgtcagggcgcgattgtcagaaccttatcccgtggtgaaacgattttctgtgacggcacctttacaggcaaagccgggcgaggtcgtttcctgcgacgcaaaccgtttgtccctcccgtgctctaaccactgccagggatctatacacaatcaagaatgatgagtgaggaaaaatgagtaagaaaattgttctcgccctgggcgggaatgcgctgggcgatgacctggccgggcaaatgaaagcggtaaaaattacttctcaggcaattgttgatttaattgcccagggacatgaagttatcgtcactcatggtaacgggccgcaggtgggcatgattaaccaggcctttgaagctgccgcaaaaactgaagcgcacagcccaatgctgccgatgtctgtctgtgttgcattaagccagggttatattggttacgatctacaaaacgctttaagagaagaactgctttctcggggcattaataaacctgtagcaacgctggttactcaggtcgaagtcgacgctaacgatccggcattcctcaacccgaccaagccgatcggtagcttctttaccgagcaagaagcagagcaactgacaaaacagggttacactctgaaagaagatgctggtcgcggctatcgccgtgttgttgccagcccaaaaccggttgatatcattgaaaaagaaacggttaaagctctggtagatgcaggtcaggtggtgatcaccgttggcggtggtggtatccctgttattcgtgaaggtaaccatctgcgtggtgccagcgcggttatcgataaagactgggccagcgcccgtttagcagaaatgattgatgccgatatgctgatcattctgactgcggtagaaaaagtggccattaacttcggtaaagagaatgaacagtggctcgatcgcctgagtttaagtgatgctgaacgctttatcgaagaaggtcattttgcgaaaggttctatgctgcctaaagtggaagctgccgccagctttgctcgctctcgcgcaggtcgtgaagcactgattaccgtattgagcaaagcgaaagaagggattgaaggcaaaacaggaacggtgatttgtcagtaatttaaaggccgggtgggtaataccatccggccaaagattgtcaagtaagtgcgctttgttgatgccggatgcggcgcgagcgccttatccgtcctacaaaacatcgcaaattcaatagattgcaatgcacttgtaggcctgataagcgtagcgcatcaggcaatttggcgtttgtcatcagtctcaggccgggtgggtaataccatccggccattttcatttaagccacttccagcacttcttttgtcgctttcacgccctgatgcatcaacatcattaacgcctcaagtacgccgccgccaatcgcccgggctttatcagaaacgctggtgaaatcagcggtttcaccacgaggatcgatatcaccaattttaaaaccaccaaccactgccaggccgtcgttcaacaagccacgcaccatccccgtcaacggtgctttaatttcatgctcaccaatccaggcaatcacatcgccctctttcaccagatcgcctaatttcacgttggatcgcataatgcctgcagcaggagcacggatcacccgtcgggtggtatgccccataatattgccaggaacaccggtattctcctgcgcacaaccagagtaaatcacctgaccgagccagtgcccgcgatttgtttcaattaccgcatgacaatccttcccagcagtaaagcccggcccaagcgcgattgttactggtgccatatctgcccgcgttcccaaattctgtttcgccagaatagcgtccaccacgcaaagcggtttcagttcatcaagcaaactacaggcgggatctaccatcacaggaatgaatccgcgttcggtaagtttcatcgcttccgcagagctggttgccaggcgagcagtgacgccttcgaccgtcatttcgccatcgaacacggcctgggcaaacgccacggtacaacgaatcactgtcggtttttccacttccagcatgatcactttaaaacccgcatgatacagacgtagcgccacaccactggcgatatctcccgcaccgcgaatcaccaccagctggtgtccggaaggatgagaaggtttcatcatcagcccacccggcgcgttatttttcacctgtaatatttctgccagcacgctgatggcgatctcctgcggcgtttccgcacctatgttgtaaccaacgggcgcatgtaaacgggcaatatgttcttcagccacgcctttctcacgcaattgacgcaggaaaagctgaaccttgcgacgacttgccagcaaccccaaccatgcaatgggctgttcaatgagtttgtcgagggcttcacgatcctgattattcgtggcaatcaggacaaaattatcagggcgaatatccagtgcttccactgccgcaccaaagctctcagcatggagaagcgtggtacttggtgggaatagttcaggattgaggctttcgcgataaatatcagcaacggcaatatcaaatcctaatagcgccgcactctgggctatcgcccggttgacatgccccgcgccaatcaacaccagacgtggacgcataccatggacgctgataaatacactcattgcacctccacaatcactcccgacagcatccgcaccgttacgagccatacgtccatggaataatcgcggcttacgttcctgcaatgcctgaaggctctcttcaatcaccttccgctcaaccattccgccaccaattgtaccgacgatagaaccatcggcgcgcactaacatttgtgcagaatggcggggagtgctgcctcggctatcaacaatttgcgccatagcaaacggacaattttgctcttcgagttttgcagcctctgtgaaaatattcataccaacctcaatggatatcctttcagtaacccggaatacccgggccgttaattcacaaatctgcgcgcgattgcaggatgttcttgtatatcgcccagccagattgcctctacgtcgtgttgttgcagcggttgaaggagctcgctttgtgcaatcgcattctcacattgagaaaaacggttaatgaaccagactcgccgacaaccttgcggtacgtttttaaacgccccctgagggtggcgaaccagcgcaacgagatcgctcagttgcaaggttgcatcaggtgttaacccggtaatatcagcaaactggctccagcgatggacattttctgtgctcactttcgcgcccaaagtatgtcctcccatcacagcaatcacgcagcaactgcttttgggtatgcaaggttcgtgctcatcaggcgcttttaacggcattccacggctgccatctgcttcaatgagaattacgtcacactctggtcgttgcaccagtgcatcaatcgcttctggcgtaaatccctgcacttttccctggttcgctttccagctgtgaaaacaaaaactaatgggggatgtaagagacgcatgaggaagcatggcgggatcacgacagaaaaccacgggccagtgagacgttggcataaacatatgtgtcgtcgtcgtgattaacacacgcctgccgctagcctggagcagttctgccagccaaaaaagcaagctggttttccccccagcaccaacaacagaaatcacagtgggacgtttctgcgcacctaaatcaatgactaatgcgcttgggtcaactatacttttcacgagtctttatgacctctctgggataaattatccccaacttaatccatcaggaagtaacgcaattatcaggcgttattagcccctataaataatggaaccactatgagtgccatcgactgtataattaccgctgccggattaagtagtagaatggggcaatggaaaatgatgttaccctgggaacagggaacaattcttgatacaagtatcaaaaatgcgttgcagttttgtagccgaattattttagtcaccggctatcgtggtaatgaactgcacgaacgttatgcgaaccagagcaatatcactattattcacaacccagattatgcgcagggtttactaacatccgtcaaggccgcagtacccgcagtgcaaacagaacattgttttctcacccacggtgacatgccaaccctcaccatcgatatttttagaaaaatctggagcttacgaaatgatggcgcaatactgccactccataatggcatccccggccatccgattttagtgagtaaaccatgcctgatgcaggcaatccaacgacccaatgtcaccaatatgcgtcaggcactccttatgggagatcattattccgtcgaaatagaaaatgcagaaataattttagatattgatactccggacgactttattacagcgaaggaaaggtatactgaaatttaaaaaacgtagttaaacgattgcgttcaaatatttaatccttccggcactcattatcataatgataaggaatcactgattttgagaaaagagaaaaattgataaatgggctggcaataataattttcaggagtgattttaattctcatttagcacctgtgagttcattcacaaaaagcccttaagtttcgagccgcctcacatttttttatatttcccgccaaacctggcaagagtggtgcgattgttgctctatccccctaaaccaccggatttctcaacaccggtcactcaatgatatctgtataagctaaggagagggttatgggggatattatgcgtcccattccgtttgaggaacttttgacgcgcatatttgatgaataccaacaacaacgcagtatctttggtattcccgagcaacagttttacagtcctgtaaaaggtaaaactgttagcgtcttcggtgaaacctgtgccactcccgtcggccctgccgctggcccgcacacgcagctcgcgcaaaatattgtcacttcctggctgactggcggacgcttcatcgaactaaaaaccgtccaaattcttgaccgcctggagctggaaaagccctgtatcgatgccgaagacgagtgctttaacaccgaatggtctaccgagtttaccctgcttaaagcctgggatgaatacctcaaagcctggtttgccctgcaccttctcgaagcgatgttccagccttctgattccggtaaaagcttcatctttaatatgagcgtcggttacaacctcgaaggtattaagcaaccgccgatgcaacagttcatcgacaatatgatggacgcatctgaccatccgaaattcgctcaatatcgcgatacgctgaataaattactccaggatgacgcatttttagctcgccacggattgcaggaaaaacgcgaaagcttgcaagccttacccgctcgcatccccaccagtatggtgcatggcgtcaccctctccaccatgcacggctgtcctccgcatgaaatcgaagccatttgccgctacatgctggaagaaaaagggctcaacacctttgtgaaacttaacccgaccttactggggtacgcgcgtgttcgtgagatcctcgatgtctgcggtttcggttacataggcttaaaagaagagagttttgatcacgacctcaagctgacgcaagcactggaaatgctggaacgcctgatggcactggcaaaagaaaaaagtctcggctttggcgtaaaactgactaacactctcggcaccatcaacaataaaggcgcactgcctggtgaagagatgtatatgagtggccgtgcgctgttcccgctctccatcaatgttgcagcagttctctctcgcgcctttgacggcaaactgcccatttcttattccggtggtgccagtcagctgactatccgcgatatttttgatacaggtattcgccctattactatggcaaccgacctgctgaaacctggcggctatctgcgcttaagtgcctgcatgcgcgagctggaaggctccgacgcctggggacttgaccatgttgacgtcgaacgactgaacagactggcagcagatgcgttaaccatggaatacacccagaaacactggaagccagaagagcgtattgaagtggcagaagacctgccgctgaccgactgctacgttgccccctgtgttactgcctgcgctatcaagcaagatattccggaatacatccgtctgcttggcgaacaccgctatgccgacgcgctggaactcatctaccaacgcaacgctctgcccgccattaccggtcatatttgcgatcaccagtgccaatacaactgtacccgcctggattacgacagtgcgctgaatatccgcgaactgaaaaaagtcgcgctggaaaaaggttgggatgaatataagcaacgctggcacaaaccagccggttctggtagtcgccatccggttgccgtgattggtgcaggtccggcgggtctggcagcaggttacttccttgccagagcgggccatccggttacgctgtttgaacgcgaagccaatgcgggcggcgtggtgaaaaatatcattcctcagttccgtattcctgcagagttaattcagcacgatatcgattttgttgccgctcacggcgtgaaatttgagtatggctgcagtcccgatttaaccattgagcagttaaaaaatcagggcttccactatgttctgattgccaccggcactgataaaaatagcggtgtgaaactggcgggcgacaaccaaaatgtctggaaaagtctccccttcctgcgtgaatacaacaagggtacagcgctcaagctgggcaaacatgtggtcgttgtcggggcgggtaacaccgcaatggactgcgctcgtgcggcgttacgcgttccaggcgtagaaaaagcaacgatcgtttaccgtcgtagtctacaagagatgcccgcatggcgcgaagagtatgaagaagcgttgcacgacggcgtagagttccgtttcctgaataatccggaacgtttcgatgctgatggcaccttaaccttgcgcgttatgagccttggcgaaccggatgagaaaggtcgtcgtcgtccggttgaaaccaatgaaacagtaacactgcttgtagacagcctgatcaccgccattggtgaacagcaggatactgaagccctgaatgcgatgggcgtgccgctggacaaaaacggctggccagacgtcgaccataatggcgaaactcgtctgactgacgtctttatgatcggcgacgtacagcgcggaccatcctccattgtcgctgctgtcggaaccgcgcgtcgggcgaccgatgccatccttagtcgggaaaatatccgttcccaccagaacgataaatactggaacaacgtcaatccagcggaaatctatcaacgtaaaggcgatatctctatcacgctggtgaacagtgacgatcgtgacgcgtttgtcgcccaggaagccgctcgctgcctcgaatgtaactacgtttgcagcaagtgtgtggatgtctgcccgaaccgcgccaacgtctccattgcggtcccaggcttccagaaccgtttccagacgctgcacctcgacgcttactgtaacgaatgcggcaactgcgctcagttctgtccgtggaacggtaaaccgtacaaagacaaaatcaccgtcttcagcctggcgcaagactttgataacagcagcaacccaggcttccttgtggaagattgccgggtacgagtacgtctgaataaccaaagctgggtgttaaacatcgacagcaaaggtcagtttaacaacgtaccaccggagctgaacgatatgtgccgcatcatcagccatgtccaccagcatcatcattatctgctgggccgcgtggaggtgtaatcatgttgattctgaagaatgtcactgcggtacagctacacccggcaaaagtgcaggaaggcgttgatatcgccatcgaaaacgatgtgattgtcgctatcggcgatgccctgacgcaacgctaccccgacgccagcttcaaagagatgcatggccggattgtgatgccagggattgtctgcagccacaaccatttttacagcgggctttcccgcggaattatggcaaacatcgcccctttgcccggatttcatcagtacgctgaaaaatctctggtggcggctcgatcgcgcccttgatgaagagagcctctattacagcggactgatttgttccctggaagcgattaagagcggatgtacaagcgttatcgatcaccatgcctctccggcgtatatcggcgggagactctccacattgcgcgacgcatttttaaaagttggcctgcgcgcgatgacctgttttgaaactactgaccgtaacaacggcatcaaagagttgcaggaaggtgtagaagaaaacatccgtttcgcccgtttgattgatgaggcgaagaaagcgacaagcgagccgtatctggtggaagcacatatcggtgctcacgcgccgtttaccgtgccggatgccggtctggagatgctgcgtgaagccgtgaaagccacaggccgtggtttgcatattcacgctgcggaagacctttacgacgtttcctacagtcaccactggtacggcaaagacctgctggcacgactggcgcaattcgatctcatcgacagcaaaacgctggtcgctcatgggctgtacttgagcaaagatgacatcaccctactcaatcagcgcgatgcgttcctggtgcataacgcccgtagtaacatgaacaaccatgtcggctacaaccatcaccttagcgacatccgcaatctggcgttgggaacggacggcattggtagcgacatgtttgaagagatgaaatttgccttctttaaacatcgcgatgcgggtggtccgctgtggcctgacagttttgccaaagccctgactaacggtaacgaactgatgagccgcaactttggcgcgaaatttgggcttctggaagccggttacaaagctgatttaaccatttgcgattacaacagcccgacgccgctgctggcagacaatatcgccgggcatatcgctttcggtatgggcagtggcagcgttcacagcgtgatggtcaatggtgtgatggtctatgaagaccgtcagtttaacttcgattgcgattccatttatgcacaagccagaaaagccgctgccagtatgtggcgtcggatggatgcgctggcataaatgacagatgccctcttcccgcagggaagagggttaaataaggaaagaagatgattgaacaatttttcaggcccgactctgtcgaacaggcgctggaactgaagcgccgctaccaggatgaagccgtctggttcgccgggggcagcaaactcaatgctacaccaacccgtaccgataaaaagattgccatttccttacaggatctggaactggactgggttgactgggataacggtgcactgcggattggcgcaatgtctcgcttgcagccactgcgtgatgcgcgatttattcctgcagcgctgcgtgaagccctcggttttgtttacagtcgccatgttcgtaatcagagcaccattggtggtgaaatcgccgcccgccaggaagagagcgtgctgcttcccgtcctgttggcactggatgctgaactggtttttggcaacggcgaaacgctgagtatcgaggactacctggcctgcccatgcgatcgcctgctaaccgaaattatcattaaagatccgtatcgcacctgtgcgacccgcaaaattagccgttctcaggcaggtttaaccgtcgtgacggcagccgttgcaatgacagaccacgacggtatgcgaattgcgctggatggcgtcgccagtaaagcactgcgtctgcatgatgtcgaaaaacaaaatctggaaggcaatgcacttgaacaggctgtcgccaacgccattttcccgcaggaagatttgcggggcagcgtggcctataaacgctatatcacgggagttctggtagccgacctgtatgccgactgccaacaggctggggaggaagccgtatgatcatccactttactttaaatggcgcgcctcaggagctaaccgttaatccaggcgaaaacgtgcaaaagctgttgtttaacatgggaatgcactctgtacgcaacagtgatgatggtttcgggtttgccggttctgacgcaataatctttaacggtaatatcgttaacgcgtccttgcttattgccgcacagttagagaaggcagatattcgtaccgcagaatctctgggcaaatggaacgagttaagtctggttcaacaggcaatggttgatgttggcgtggtgcagtctggttataacgatccagctgcagctctgattatcaccgatcttctcgatcgcatcgccgcacctacccgcgaagagatcgacgacgcgctttctggtttgttcagccgcgatgctggctggcagcaatactatcaggtcattgaactggcggttgcacgtaaaaataatccgcaggccaccattgatatcgctccgactttccgtgacgacctagaagtcattggtaagcattatcctaaaactgatgccgcgaaaatggtgcaggcgaaaccctgctatgttgaagaccgcgtaacggctgacgcctgcgtcattaaaatgttacgtagcccacacgctcacgcactgattactcatctggatgtcagcaaagctgaagccttaccgggcgtcgttcacgttattactcacctgaattgcccggatatctactataccccgggtggtcagagcgcaccggaaccgagtccgcttgaccgccgtatgttcggcaagaaaatgcgtcacgtcggcgatcgtgttgctgcggtcgtcgcagaaagtgaagaaattgcgctcgaagcactgaagctcatcgacgttgaatatgaagtgcttaagccggtaatgagcatcgacgaagcaatggcggaagatgcgcctgtcgtgcacgatgaaccggtggtgtatgttgctggtgcgccagatactctggaagacgataacagccatgcagcccagcgcggcgagcatatgatcatcaacttcccgatcggttctcgccctcgcaaaaatatcgccgccagtattcatggtcatattggcgatatggacaaaggctttgccgatgccgatgtgatcattgagcgaacctataacagtacgcaagcgcagcagtgcccgactgaaacacatatctgctttactcgtatggacggcgatcgtctggttatccacgcctccacccaggtaccatggcacttacgccgccaggtcgcgcgcctcgtgggcatgaaacagcataaagttcatgtcattaaagagcgagttggcggcggttttggttccaaacaggacatcctgctggaagaagtgtgcgcctgggcaacctgcgtgaccgggcgtccggtactgttccgctacacccgtgaagaagagtttattgctaacacctctcgtcacgtcgcgaaagtcaccgtcaaactgggagcgaaaaaagatggtcgcctgacggcagtgaagatggatttccgcgccaacactggcccttacggcaaccacagtctcaccgtaccgtgtaacggaccggcgctgagcctgccgttatatccgtgcgataacgtcgatttccaggtcaccacctactacagcaacatttgcccaaatggtgcttatcagggttatggcgcaccgaaaggtaacttcgctatcaccatggcattagcggaactggctgaacagttacagatcgaccaactggaaattatcgaacgtaaccgggtacacgaagggcaagagctgaaaattctcggtgcaatcggtgaaggtaaagcgccgacctccgttccttccgccgccagctgtgcactggaagagatcctgcgtcagggtcgcgagatgatccaatggagcagtccgaaaccgcaaaatggtgactggcacatcggtcgcggcgtcgccattatcatgcagaaaagcggtatcccggatatcgatcaggctaactgcatgatcaaactggaaagcgacggcacctttatcgttcattctggcggtgcggatattggtactggtctggatactgtagtgacgaaactggcagcagaagtgctgcactgcccaccgcaggacgtgcatgttatctccggtgataccgatcatgcgttgtttgataaaggcgcatatgccagctccggtacttgcttcagcggtaacgcggcgcgtttggcagcggaaaatctacgggagaaaattctgttccacggcgcgcaaatgttgggtgagccagtggcagatgttcaactggcaacgccgggcgtcgtgcgcggcaagaaaggcgaagttagtttcggggatattgcccataaaggcgaaaccggcaccggctttggtagtctggtgggaactggcagttatatcacgcctgatttcgccttcccgtatggcgcaaacttcgctgaagttgccgtcaacacgcgtacgggtgaaatccgcctggataaattctacgccttgctggactgcggtacaccggtcaatccagagttagcgttgggacaaatctacggtgccaccctgcgtgctatcggccacagtatgagcgaagagatcatttatgacgccgaaggtcacccgttaacgcgtgatttacgcagttacggcgcaccgaaaattggtgacattccgcgtgatttccgcgctgtgctggtgccgagcgacgataaagtcggcccgttcggggcgaaaagcatcagcgaaatcggtgtaaatggcgcagctccggcgattgctaccgcaattcacgatgcatgcggcatctggttacgcgaatggcatttcacaccggagaaaatactcactgcgctggaaaaaatataaataataaatggccgcttcggcggcctgtttctctgtttgaacgatgactaaatagtgactgcgaaaatgagataagccgttctcaaggcgtcctgcgccccaaattcgtgggaatttattttactaattcagatgatcaaatttactttaaaaggagtgaagggatgtctgatataaaccatgcaggttctgaccttatatttgaactggaggatcgccctccctttcatcaggctctcgttggtgccattacccatctgttggcaattttcgttccgatggtaacccccgcgttaatcgtgggtgcggccttacagctttccgctgaaacaactgcctatcttgtttctatggcgatgatcgcctctggtattggtacctggttacaagtaaaccgctacggcatcgtcggttctggcctactcagtattcagagtgtcaattttagttttgttacggtcatgattgcgctgggcagcagcatgaaaagcgacggttttcacgaagagttaatcatgagcagccttctcggcgtctccttcgttggcgcatttctggttgtcggatctagttttatcttgccctatttacgtcgggttattacgcctaccgtcagcggtattgtggtactgatgatcggcttaagcctgattaaagtcggcattatcgattttggtggaggatttgcagccaaaagcagcggtacgttcggcaattacgaacatctcggcgttggtttattggttttaattgtggtgatcggctttaactgctgtcgcagtccgttgctacgcatgggagggatcgccattgggctatgtgtcggctatatcgcaagcttatgcctgggcatggtggatttcagcagtatgcgcaatttgccgttaatcaccatcccgcatccgttcaaatacggctttagttttagcttccatcagttcctggtggttggcacgatttatctgcttagcgtgctggaagcagtcggcgatatcaccgccacggcaatggtttcccgccgccccattcagggggaagagtatcagtcccggctgaaaggcggcgtgctggcagatggtctggtttctgttatcgcctccgctgtcggtagtttaccattaaccacgtttgcgcaaaataatggggttattcagatgactggcgtcgctagtcgttatgtcgggcgaaccatcgcggtaatgctggttatcctcggcttatttccgatgattggcggcttcttcacgaccattcccagcgcagttctgggaggcgcaatgacgttgatgttttccatgattgccatcgcagggattcgcatcatcatcaccaacggtttaaagcgccgtgaaacacttattgtcgccacttctttaggtttagggcttggcgtctcctacgatcccgaaatttttaaaatattgccagcctctatttatgtattagttgaaaaccctatttgtgctggcgggttaactgcgattttattaaatattatcctccctggtggctaccgacaggaaaacgttctgcctggtattaccagtgcggaagagatggattaacagtaaaggagtcaatgatgagtggagaacacacgttaaaagcggtacgaggcagttttattgatgtcacccgtacgatcgataacccggaagagattgcctctgcgctgcggtttattgaggatggtttattactcattaaacagggaaaagtggaatggtttggcgaatgggaaaacggaaagcatcaaattcctgacaccattcgcgtgcgcgactatcgcggcaaactgatagtaccgggctttgtcgatacacatatccattatccgcaaagtgaaatggtgggggcctatggtgagcaattgctggagtggttgaataaacacaccttccctactgaacgtcgttatgaggatttagagtacgcccgcgaaatgagcgcgttcttcatcaagcagcttttacgtaacggaaccaccacggcgctggtgtttggcactgttcatccgcaatctgttgatgcgctgtttgaagccgccagtcatatcaatatgcgtatgattgccggtaaggtgatgatggaccgcaacgcaccggattatctgctcgacactgccgaaagcagctatcaccaaagcaaagaactgatcgaacgctggcacaaaaatggtcgtctgctatatgcgattacgccacgcttcgccccgaccagttctcctgaacagatggcgatggcgcaacgcctgaaagaagaatatccggatacgtgggtacatacccatctctgtgaaaacaaagatgaaattgcctgggtgaaaagcctttatcctgaccatgatggttatctggatgtttaccatcagtacggcctgaccggtaaaaactgtgtctttgctcactgcgtccatctcgaagaaaaagagtgggatcgtctcagcgaaaccaaatccagcattgctttctgtccgacctccaacctttacctcggcagcggcttattcaacttgaaaaaagcatggcagaagaaagttaaagtgggcatgggaacggatatcggtgccggaaccactttcaacatgctgcaaacgctgaacgaagcctacaaagtattgcaattacaaggctatcgcctcagcgcatatgaagcgttttacctggccacgctcggcggagcgaaatctctgggccttgacgatttgattggcaactttttacctggcaaagaggctgatttcgtggtgatggaacccaccgccactccgctacagcagctgcgctatgacaactctgtttctttagtcgacaaattgttcgtgatgatgacgttgggcgatgaccgtagcatctaccgcacctacgttgatggtcgtctggtgtacgaacgcaactaataataaaactttaacatcctcgtgaggacatcattatgtctggagacatcctacaaacaccggacgcaccaaagccacagggcgcgctggataattattttaaaattaccgctcgtggcagtaccgttcgtcaggaagtactggctggcttaacgacctttctggccatggtttattccgttatcgtcgttccgggaatgctgggcaaagcaggttttcctcccgcagctgtgtttgttgccacctgtctggtcgcgggcttcggcagcttgctgatgggattatgggctaatttgccaatggcgattggttgcgcgatttccttgacggcgtttaccgcattcagtctggtactcgggcaacaaattagcgttcctgtcgcactgggcgcggtatttctgatgggcgtcatcttcaccgccatttccgtaaccggtgtgcgtacctggatcttacgtaatttgccgatgggtatcgctcacggtacaggtatcggtatcgggctgtttctgctgctgattgctgctaacggtgtgggtatggttatcaaaaacccgattgaaggcttgccagtggcgctcggtgcgtttacctccttcccggtgatgatgagcttgctggggctggcggtcatcttcggcctggagaagtgtcgcgtacccggcgggatcttgttggtgattattgcaattagcatcatcggcttaatctttgacccagcggtgaaataccacggtctggtggcgatgccaagcctgactggcgaagatggtaagtctctgattttcagcctcgatattatgggtgcactccagccaactgtacttccgagtgtactggcattggtgatgaccgcagtgttcgacgctactggcaccatccgtgccgtcgccggtcaggcgaatttgttggataaagacaaccagatcatcaacggcggcaaagccctgaccagtgacagtgtaagtagtatattctccggcctggtgggcgcagcgcccgcagcggtttatatcgaaagtgcggcaggaaccgccgccgggggtaaaacaggtttaaccgcaaccgtagtgggggcgttattcctgttaattctgtttttaagtccgctgagttttttgatccctggttacgccactgcacccgctctgatgtacgtaggtttgctgatgttaagtaacgtcagcaagctggatttcaatgattttattgacgctatggctggcctggtgtgtgccgtgttcatcgttctgacttgtaatatcgttaccggtattatgctgggctttgtgacactggtcgtaggccgcgtctttgcacgcgaatggcaaaagctgaatattggtacggtgatcattactgccgcactggtcgcattttacgcgggtggttgggcaatctaatagattctccgcgcctttcagcgcggagatttctttcagagaggattctcaccgctggcaacaatacgctgctggcggactcgcctgagttctctttcagtaagcaactgcagcgcctgtgttgggcaagattcaacgcaggctggcccctcttcccgctgttcacagagatcgcatttcacaatttgttgtcgggtatcccccggcaagctctgaatggtgatcattccaaacgggcacgcactgacgcaactctgacagccaatacaacgggcagaattggtctgcaccacctgctcgcccatcgtcagcgcccccacggggcaagcgccaacacaaggggcgttttcacactgatggcacatcaccggcgcactgatgctgtccagtcgctgtaccttcagccggggtaaaaagacatcggcattcaactcctgttcactagggtgagcgaccacacaggctacttcacaagtacggcagccaatacagtcagccggattaacgataattaagcttttcatcagcttgccttcgtatcaaacagagttaacatatcgcgcgccgcctgccttcctgcggccattgcagtgacaaccagatccgcgccatgaactgcatcaccaccagcaaagacttttttcagatgcgtctgggtaggtaaatacccgacgtcaccggtttgaatcaggccccatttatcgagtttaattccgctgccctgcaaccacggcatggcatgcgcctggaaaccaaaggccataatcagaacatcggcgggcaattcaaactcactacccgctaccggacgaggacgacggcgaccatccggccccggctcacccatggcggtacgaatcaggcccaccgcagttaaacgcccatcttcgtcacaagcgatatattgcggttgaacattgaactgaaactcgacaccttcctcgcgcgcattaaccacctctttgcggctgcccggcatactgacttcatcacgacgatacgcgcaggtcacgctggcggcattgaggcggatggaagtccgcaaacaatccattgtcgtatcgccaccgcccaataccacgactcgcttaccttccacgtccgtcagcggatactcttcagactccggcaatcccatgagctggcgggtatgggcagtcaggaacggtagagcctgaatgacaccgggcgcatcttcatgcggcagatctgctcgcatcatcccgtaagtccccacgccgatgaaaactgcatcatattcagaagttaaatcgctaaaggtaatatcgcggccaatttcacagttaagatgaaagtcgattcccattgcggtgaatatctctcgccgctggcttaataccgttttatcgagtttgaaaggaggaatgccaaaagtcagcataccgccaatttctggatggcgatcaaagacatcgacctgaactcctgcgcgcgccagaatatcagcacaccctaaccctgcaggcccagcgccaatcaccgccactttttcgctacggggaacaactttgctgacatcgggacgccaacccatcgccagcgcggtatcggtgatgtagcgttccagattaccgatagagactgcgccgctgtgatctttcaaagtacatgcgccttcacaaagacggtcctgtggacataccctgccgcaaatttctggtaaggaactggtctggtggcaaagttctgccgcttcaataatctttccttcctgtaccagacggatgtaatccggaatagcgttatgcagcgggcaatgccagttgcagttagctttttcggcacaataaacacagcggtcactctcataagtcgcttgttgtggatccagcccgcaatatatttcgccaaagtgggttttccgttcactcgcactaattttatctgcgcctttacggctgttaacggggagcaacgctgcactgcgagatggctgagcgtcactactcgcttttcctgctgccgttttgcgctggcgggccacctttatctgctgcaaccctttatcgtccatcagtcgtaacgcctgtgttgggcaaacttcaatacaggcttgcgtgccggaactgcgctggttacaaaggtcgcatttctgcgcaatcgtatcgaccatctcaacgacgccaaaggggcaagcgattgcgcatcttttacaaccaatacatttttgctcgtccagttgtacgctatcggactggaaagtcagagcattaaccggacaagccgtaacgcaaggggcattgttgcagtgatggcaggccaccggattcgcagcctggcctttccctacaacgtggatacgcggtcgaaagtcactgtgactcagcggccagttttcttgattgtgtgccaccgcacaggcaatttcacaagcatgacagcctatacattccgcagcttcagcagcaataaacttattcatttgcatccctttcatttaatgagttatgtcttctcaaatttcgcgatgcaataaacgggcatatattaggtagcatgaccgttttaattataattttgcgactgagttcaaattattgcccctcaatctatgccgctttcattatttcaacattgccgatcaaaagagcgctatccagataaaaacgattaaatgcgagagtgcgacatgccagaatgattaatgaaatatcaatatgagaaaattacagataattccattgtcaggttctcttctcattttcgtggtttaaccacgattatgtgattgcctccgcaattcctgtctctaactccccttcctcgcaaaaactggcactccacgagcatgtgtttagacagtttcattaacgtaaacggttgctttttactctggcgggcgaaaggagaaacactgatgagcgccatagattcccaacttcccagttcttctgggcaagaccgcccaactgatgaggttgaccgcatattaagtccaggaaagctgatcatactcggtctgcaacacgtccttgtcatgtacgcaggtgcagtcgctgttcctcttatgattggtgaccgactgggcctcagtaaagaagctattgcgatgctcattagcagcgatctcttttgctgcgggatcgtcacattattgcaatgtatcggtatcggccgctttatggggatccgcctgccggtgattatgagcgtgacctttgctgctgtaacaccaatgatagccattgggatgaacccggatatcggcctgctggggatatttggtgccactatcgccgcgggttttatcaccacattattagcgccacttatcggtcgcttgatgcctttattcccgccactggttaccggtgtggttattacttctatcgggcttagcatcattcaggtgggtattgactgggccgccggaggtaaagggaatccgcaatatggtaatcccgtttatttaggtatctcctttgccgtcttaatttttatcttgctcattactcgctatgcgaaaggatttatgtccaacgtcgccgtattactggggattgtatttggctttttacttagctggatgatgaatgaagtcaatttatccgggctacatgatgctagttggtttgcgattgttacgccgatgagctttggtatgccgattttcgatcccgtttccattctgaccatgactgccgtgttaatcatcgtgtttatcgagagtatggggatgttcctggcactgggtgaaatagtcggtcgtaaactctctagccacgatattattcgcgggctgcgtgtcgatggcgtagggacaatgataggcggcacgtttaacagcttcccccacacgagtttttctcaaaacgttggcctggttagcgtgacgcgcgttcatagccgctgggtgtgtatttctagcggaattatattaatcctgtttggcatggtgccaaaaatggcggtgctggtagcctccattccgcaatttgtgctgggcggcgctggtctagtgatgttcggcatggtactggcgacagggattcgaattctgagccgctgtaactacaccaccaaccgttacaacctctatattgtggcgatcagtctcggcgttggcatgactccgacgctctctcacgatttcttttctaagttaccggccgtactgcaaccgctgctacatagcggcattatgctcgcaacccttagcgccgttgtgctgaacgtcttctttaatggctatcagcatcatgctgacctggtgaaggaatccgtctctgataaagatttaaaagtcaggacagtacgtatgtggcttctgatgcgcaagctgaagaaaaatgagcatggagaataatatgaattttttaatgcgcgctatattcagtctgttgttgctttttactctctctattcctgtcatttctgactgtgttgcaatggccattgaaagtcgcttcaaatatatgatgctacttttttaaatggtttttacctgtcggcatccgctcaaaacgggcggttgtcgataaacgctcacttggttaatcatttcactcttcaattatctataatgatgagtgatcagaattacatgtgagaaattatgcaaacggaacacgtcattttattgaatgcacagggagttcccacgggtacgctggaaaagtatgccgcacacacggcagacacccgcttacatctcgcgttctccagttggctgtttaatgccaaaggacaattattagttacccgccgcgcactgagcaaaaaagcatggcctggcgtgtggactaacagcgtttgtgggcacccacaactgggagaaagcaacgaagacgcagtgatccgccgttgccgttatgagcttggcgtggaaattacgcctcctgaatctatctatcctgactttcgctaccgcgccaccgatccgagtggcattgtggaaaatgaagtgtgtccggtatttgccgcacgcaccactagtgcgttacagatcaatgatgatgaagtgatggattatcaatggtgtgatttagcagatgtattacacggtattgatgccacgccgtgggcgttcagtccgtggatggtgatgcaggcgacaaatcgcgaagccagaaaacgattatctgcatttacccagcttaaataaaaaaaccccgacatttgccggggttgtgagcataacgtaatgcttattttaccggacgcatcgccgggaacagaataacgtcgcggatggtatggctgttggtgaacagcattaccatacggtcgataccaattcccagacctgctgtcggcggtaagccatgttccagtgcggtgacgtaatcttcatcgtagaacatcgcttcgtcgtcacctgcgtctttcgcggcaacctgatccaggaagcgttgcgcctgatcttccgcgtcattcagctcgctaaagccgttaccgatttcacgaccaccaatgaagaactcaaagcggtctgtgatttccgggttaacgtcgttacgacgcgccagcggagaaacttctgccggatattcagtaatgaaggtcggctgaatcagatgtgcttctgccacttcttcgaagatctcggtaacgatacggcccagaccccagctcttctcaacgtggatgccgatagattcagcaattgctttcgcagagtcgaagttgtccagatccgccatgtcggtttccgggcgatatttcttgatcgcttcacgcatggtcagtttttcgaacggtttaccgaagtccagcgtcacgtcgccgtaggtcacttccgtcttaccgagaatatcctgtgccagagtacggaacaggctttcggtcagctcgatcagatctttgtaatctgcgtaagccatgtagagttccatcatggtgaactctgggttatgacgtacggaaataccttcgttacggaagttacggttgatttcgaatacacgctcgaagccaccaaccaccagacgcttgaggtacagttccggcgcgatacgcaggtacatgtcgagatccagcgcgttatggtgggtgataaacggacgcgcagcggcaccgccagggatcacctgcatcatcggcgtttcaacttccataaagccgcggttcaccatgaactggcgaataccagagaggatctggctgcgcactttaaaggtgttgcgggattcatcgttggagatgagatcgagataacgctgacgatagcgcgcttcctgatcctgcaagccgtggaatttatccggcagcggacgcagtgctttggtcagcagacgcaactcggtgcagtggatagacagttcgccggttttggttttgaacagcttacctttcgcgccgaggatgtcgccgaggtcccattttttgaactgctcgttataaacgccttccgggagatcgtcacgggcaacgtacagctgaatgcgaccgccaacgtcctgcagggtaacgaaagacgctttacccataatacgacgggtcatcatgcggccagcaacggcgacttcgatgttcagcgcttccagttcttcgttctctttgccgtcgaattctgcgtgcaattggtcagaggtatgatcgcgacggaaatcgttcgggaaggcaatcccctgctcgcgcaggttcgccagcttctcacgacgcgttttcagttcattgttaagatcgactaccgcgtcagcgccctgtgcgtgttgttcagacatgttggttcctcataaccctgctttcaaacttgcttcgataaattgatccaggctgccgtccagcacggcctgcgtgttgcgggtttctaccccggtgcgcagatctttaatgcgggagtcatcaaggacataagaacgaatctggctgccccagccgatgtcggatttgttatcttccatcgcctgtttctcggcatttttcttctgcatctccagttcataaagcttcgctttcatctgcttcatggcctgatctttgttcttgtgctgggaacggtcgttctggcactgggtcacgatcccggtcgggatgtgggtaatacgcaccgcagattcggtacggttaacgtgctgaccgcccgcgccggacgtgcgataaacgtcaatgcgcagatccgccgggttgatttcgatatcaatatcatcatcaacttccggataaacaaacgcggagctgaagctcgtgtggcgacgaccgccggagtcaaacgggcttttacgcaccaggcggtgaacgccggtttctgtacgcagccagccgtaagcgtaatcgccggagattttgatcgtcacggatttaatacccgccacttcaccttcgctctcttcgatgatttcagttttgaaaccacggctttctgcccagcgcagatacatacgctcaagcatgctcgcccagtcctgtgcttccgtaccgccagaccccgcctgaatatcgaggtagcagtcggcgctgtcatattcgccagagaacatacggcggaactcaagctgcgccagtttttcttccagggcgtcgagttcagcaacggcttcgttaaaggtttcttcgtcgtcagcttctacagccagttccagcagaccagaaacatcttccagcccctgtttcatttggtcgagggtgtcgacaacggcttcgagggaggaacgctctttacccagcgcctgtgcgcgttcgggttcgttccagacatccggctgttccagctcggcgtttacttcttccagacgctctttcttggcgtcgtagtcaaagataccccctaagaacgtcggagcgttccgtgaggtcctgaatgcgattatttaccggattaatttcaaacatggtctgatttcttttattgagctagtcaaaatgcggtgataagagcgggattgtacccaatccacgctcttttttatagagaagatgacgttaaattggccagatattgtcgatgataatttgcaggctgcggttgccgcgaaactcgttgatatcgagcttataagccagttgcacttcgcgcacgccgttatccggccagagggcggtatcgacattaaaagcaataccatccagcagtggaccgccgccgaccggttcgaccatcaccttcaaatgacgttcgcccaccagccgctgttgcagcagacggaaatgaccgtcaaacagcggctccgggaacatctgcccccacgggccagcatcgcgcagcagctgcgccacttccatggtcatttcggccgggcttaacggaccgtcacttaccacttcgccttgcaataggctagggtccagccactcagtaaccagttcgccaaaccgttgttgaaagagtttgaatttatcctcttccaggctcaaacccgccgccatcgcatgaccgccaaacttcagcatcatgccagggtagagtgtgtctaatcgctccagcgcatcacgcatatgcagcccctgaatggagcgaccggaacctttcagcgtaccgtcacctgctggcgcaaacgcgataaccggacggtgaaaacgctctttgatgcggctagccagaataccgacaacgccctgatgccattcggggtgatacattgccagcccgccgggtagcgtgtcacggctgcgctccagtttctcgcacagggtcagggcttcaatttgcattccttgttcgatctcttttcgcgtctggtttagcgcatcgagttcatttgccagcacgcgcgcttcgccgatgttgtcgcacaacaacagcgccacaccgacggacatatcgtccagtcgtccggcagcattgagacgtggccccagcgcaaaacctaaatcgctggcggcgagtttttgtgcatcacggtttgccacttcaagcagcgctttaatccccggacggcactttccggctcggatgcgactcatcccctgccaggtcagaatgcgattattagcgtccagcggcacgacgtccgccactgtccccagcgcgaccagatccagcagttctgccaggttaggaattgcgatgttacgctcatcaaaccagccctgatcgcgcaaaaaggtgcgcagcgccagcatcagataaaacgccacacccacgcctgccagacttttgctcgggaaattacagtcgcgcaagttagggttaatgatcgcttccgctgcgggtaatgtgtcgcctggcaaatggtgatcggtaacaataaccgggatgcccaagctgcgagcgtgctcaacccccgcatgggaggaaataccgttatccaccgtgacaattaactgcgcgccacgggcatgggcctgatcgaccacttccgggcttaagccgtaaccgtcttcgaaacggtttggtaccaggtagtcgatattgctgcaaccaaggctgcgcatcgccagcacgcttagagccgtgctggtcgcgccgtcggcgtcgaaatcaccgaccacaataatccgcgttccttcgcgaaaagcgttgtaaaggatctcaacggccttttcgacgccgctcagttgctgccagggcagcatacctttaacactgcgttccagttcttgcgcactgcgtactccccggctggcgtataaacggcgcagcaagggaggcaattcagcgggcaagtctgccgtttcatcgacttcacggcgacgaagttgtatctgttgtttcacgcgaattatttaccgctggtcattttttggtgttcgtcgaggaattctttcatctctttcggcggctggtaacccggaacaagtgtgccattgctcagcacaactgccggagtaccgctaacgccaagctggacgccaagtgcgtaatggtcggcaatatccacgtcgcaactggctggtgcgacgcttttacctgccatcacatcatcaaacgctttgtttttatctttcgcacaccagatagctttcatttctttctctgcatcgctgtccagcccctggcgcgggaaagcaagataacgcacggtgatccccagcgcgttgtagtctgccatttgctcatgcagtttgtggcagtaaccacaggtaatatcagtaaacacggtgatgacgtgtttttcctgcggcgctttataaacgatcatctctttttcaagcgcattcaactgctttaacagcatcttattggtgacattgaccggagccgtgccactaacgtcatacattggcccctgaatgatatgtttaccatcatcggtgatgtacaacacgccgctgttagtcagaactgtcttcatgccagctacaggcgcgggctgaatatcgctgcttttgatgcccattttggctaacgtttgttgaattgccgcgtcatcagcctgagcaaagccactaaacgccgctaacaaagtaaacaacataaaacctttcttcataaatcttcccgttcttttcagacatcacgcccgcgggtgatgctgttgatgaagttgccgcagacgctcggtagcgacatgcgtataaatttgcgtggtggagagatcgctgtggcccagtagcatctgcaccacgcgtaaatccgcaccatgatttaataaatgagtggcaaaagcgtgacgcaacacatgcggactcagcttttcgctgtcgatacccgccagcacagcataatgtttaatacggtgccagaaggtctgtcgcgtcatctgctgcgcacgctggctgggaaacaacacgtcaatactcacaccattcagcagccacggacgcccatgttccagataggtttccagccagtaaaccgcctcttcacctaacggcaccagacgctctttgttgcctttaccaatgacccgtaccacgccctgacgcaggctgatatcactcattgtcagtccgaccagttcagagacacgcagcccggtagcatacaacacttcaagcatggctttatcgcgtagctccagtggctgatcgattaatggtgcctgtaataaacgttcgacctgcgcttcgcttaaatcttttggcaaacgctggggcaatttcggactagcgagatgcgcactgggatcgtcttcacgaaacttttcgcgataaagatactggaacaatcggcgcactgcactcagcaaacgcgcactgctggtggctttatacccgccctccagccgttctgccagtaatgcctgcaaatcgtcactttgcgccgtcgccagcgtcaacccgcggtgatgcaaccactccaccatcatactcagatcgcgacggtaagcgttcaacgtattttcagccagatttttttccagccacagagcatcaagaaactgctcgatgcgtgccagatcctgtttcacttgcgccccttatggtcactcatttgatccattatgccttattgtgccgtgactaaagcgattctgatacactagccgcaaaagccacagcagaatcgagaagcttacgttatgaatatgggtcttttttacggttccagcacctgttacaccgaaatggcggcagaaaaaatccgcgatattatcggcccagaactggtgaccttacataacctcaaggacgactccccgaaattaatggagcagtacgatgtgctcattctgggtatcccgacctgggattttggtgaaatccaggaagactgggaagccgtctgggatcagctcgacgacctgaaccttgaaggtaaaattgttgcgctgtatgggcttggcgatcaactgggatacggcgagtggttcctcgatgcgctcggtatgctgcatgacaaactcagcaccaaaggcgtgaagttcgtcggctactggccaacggaaggatatgaatttaccagcccgaaaccggtgattgctgacgggcaactgttcgtgggtctggcgctggatgaaactaaccagtatgaccttagcgacgagcgtattcagagctggtgcgagcaaatcctcaacgaaatggcagagcattacgcctgatctcactgacggcttagcgcatatgctttgccgtcatctttatctttgcgtctcttgttgcaacaaaatccgccgtaaatcccgccattcagcttcgtccatgctgtcggctgccagccataaatgttgccgtttaccgccatcagaacgtaaacgcagcatcatgccgctcttaatcatccacggtgctttgacgatgctccactcctgcccttgccaacgcaaacgcccgtccatcaacaagcgaatttccccctggcgagcattaatacgccgctggctgcgaacgcaatcaaacaccaccaggctaagtaacaccatccataacggggtgtaactgagtggccagggcatgagtaaaataacagcggcaaccagcccatgaatcagcaaggaaagccactgtgcgcgccaggagacgcgcaaatcagattgccacaggaccacgttcccggttccgtgtctggatgagtcggaccatcatttccagttctgcatcggccggtttaccgtgattcatcagccagttaaacaggtccggatcgtcacattccagcagacgaataaagatgcgtttttcgtcatcgcttaagctgtcgtactcatgttcgaaaaacggcatgatactaatatcgagttcgcgcataccacggcggcatgcccaatgaatgcgggctttgttgttaatgtccatcttcttcctgtctcacgaaaatccagtacccggctattgtaacgtgtttttcgccttcttttacgggaatatcagtaaacaccatcgcgatcgcgaaattaattcacaacaattcaatggcttcatttttttggaagtcgcctcgcagaaggcacagatcgcgtagtgaaagcacttgcattgcctcatagctcttttaccattagtcattaatacgccgttaagcaactcaggactctattatggcttttacaccttttcctccccgtcagcctacggcttctgcccgtttaccgctgacgctgatgacgcttgatgactgggcgcttgccaccattactggcgcggacagcgaaaaatatatgcagggtcaggtgacagcagatgtcagccagatggcagaagatcagcacctgctcgccgcccattgcgacgccaaaggtaaaatgtggagcaatttacgtctgttccgcgacggcgatggctttgcatggattgaacggcgcagcgtgcgtgaaccgcagctgactgaactgaaaaaatatgcggtattctctaaagtgaccatcgcgccagacgacgagcgtgtgctgcttggtgttgccggttttcaggcgcgcgccgcgctggcaaatctctttagcgaactgcctagcaaagaaaaacaggtagtcaaagaaggcgcgaccactttgctatggtttgaacacccggcagaacgtttcctgatcgtaaccgatgaagctactgctaatatgctgaccgataaactgcgcggtgaagcggaactgaacaatagccaacagtggctggcattaaacattgaagcgggtttcccggtgattgatgccgccaacagcgggcagtttatcccacaggcgaccaatctccaggcgctgggcggtatcagctttaagaaaggctgttataccggacaagagatggtggcgcgagcaaaattccgtggtgccaataaacgtgcgctctggttgctggcaggtagcgccagccgactgccggaagctggtgaagacttagagctgaaaatgggcgagaactggcgtcgtaccggtacggtactggctgcggtaaaactggaagatggtcaggtcgtggtacaggtcgtcatgaataacgatatggaaccggatagcatcttccgcgtacgcgacgatgcgaatacattgcatatcgagccgctgccgtatagcctcgaagagtaaatctctttatcgcatcaggcatttatcgcctgatgcgacgctggcgcgtcttatcatgtctgggatttgatgcctttatcacaacagggacgaggcccgtagatcggataaggcgttcacgccgaatccggcagttgtgctccgatgcctgatgcgacgctggcgcgtcttatcaggcctacaaaggcatacccattacgcctgcccaatatacaaatagatcgccagaaagtggcacacactaccgccgagcacgaagccgtgccagatggcatggttgtatggaatgcgtttgcagacgtagaaaatcaccccgaggctataaaccacgccgcctaccgccagtaaggtaacgctgcccgccgcgagcttaactgccatttcataaattaccaccaggctcagccagcccatcgccagataggtcaccagagataaaattttgaatcggtgcgcgatggtcagtttaaacagaatacccagcaatgccaggctccagataacaatcatcaacccgcgcgctaacggagaatccagccccaccagcaaaaacggcgtgtaggttccggcaatcaacaggtaaatagcgcaatggtcaaatttcttcagccacatttttgcccgttgatgaggaatggcgtgatagagcgtgctagcgaggaacagcaggatcatactgccgccatagaggctgtagctggttatcgctgtggcgctggcattaagatccaccgcctgaaccagtagcaacaccagcccaacgataccaaacaccaacccaatgccgtgactgacgctgttggctatttcctctgccagactatatccctgcttaatgaggggcttctgaaccataacttactccggagaaacgtacacgcacatgtatacctctccagcgtaactgagaatagttccagtgaacacctgttagctaaaataaattctgatttgagactaatctcctaaaaatcatgaaattaaatgcgaaatttcaactaacaggcgtgagttcaatttaaagacatttaaattcaatcacataaaattgtgtctgaccgggatagatgtcagcaatgacttttttcagttcagtcagggtcatattttcctgctctgcatgtttttcagtcagcgtatccagcgttacggtactggttgcggtgacttcaatcgtgcaaaaataaccgtcatcttcaaaacgtccgacacgaagcacatcacccgttttgaagtggctttcagactcgtcgcggatggtgatggttttacgcccagccagaatgtcatcctggaaacgttgaaaaaaagtgatgtcgtttggctgcatggtactatttcctgtaagaattgactcatctggagcctatgatagtgaaaaaactcaccttaccgaaagatttcttatggggcggcgcagttgccgctcatcaggtcgaaggcggctggaacaaaggcggaaaagggccgagcatttgtgacgttctgaccggtggcgcacacggcgtgccgcgcgaaatcaccaaagaagtcttgccaggaaaatactatccaaaccatgaagccgttgatttttatggtcactataaggaagacatcaagctatttgccgaaatgggcttcaaatgttttcgtacatccattgcctggacgcgcatttttccaaaaggcgatgaagctcagccaaacgaagaagggctgaagttctacgatgatatgttcgatgaactgctgaaatacaacatcgaaccggtgatcaccctctcccactttgaaatgccgctgcatctggtgcagcaatacggtagctggaccaaccgtaaagtggttgatttctttgtacgtttcgcggaagtggtatttgaacgctataagcacaaagtcaaatactggatgaccttcaacgaaattaacaaccagcgtaactggcgtgcaccgctgttcggttactgctgctccggcgtggtgtataccgagcatgaaaacccggaagagacgatgtatcaggtgctgcatcaccagtttgtcgccagcgccctggcggtgaaagctgcgcgtcgcattaacccggagatgaaagtcggctgtatgctggcgatggtgccgctctatccttactcctgtaacccggacgatgtgatgttcgctcaggagagcatgcgcgaacgctacgtctttaccgatgtgcagctacgcggctattacccgtcctatgtgttgaacgagtgggagcgtcgcggatttaacatcaaaatggaagacggcgatctggatgtgctgcgtgaaggcacctgcgattatcttggtttcagctattacatgaccaatgcagtgaaggccgaaggcggcaccggcgatgcgatctctggttttgaaggcagcgtaccaaacccgtatgttaaagcatctgactggggctggcagattgatccagtaggtctgcgctatgcactttgcgaactgtatgagcgttatcagaggccgctgtttattgtcgaaaacggttttggcgcttacgacaaagtggaagaagatggcagcatcaacgacgactaccgcattgactacctgcgcgcccatatcgaagagatgaaaaaagcggtgacttacgatggcgtggatctgatgggctacacaccgtggggctgcatcgactgcgtgagcttcaccaccgggcagtacagcaaacgctacggctttatctatgtgaataaacatgacgacggtactggcgatatgagccgtagtcgtaagaagagctttaactggtacaaagaggtgattgccagcaacggcgagaagctttaagtcgatgaagtaccggatgcaatacttgttgcatccggtcagacaacttccctgttttatttcccgcccgccaaatcgataaaacttcccgtgacgtaagaggctttatcacttagtagccagacaatggcctgcgcgacctcttctgcctgtccaccacgctgcatggggatgttgctcttaacgcgatcgacgcgtccaggctcgccgccgctggcgtgcatttcggtataaataaaccctggccgcacgcagttaacgcggatcccctgcgcggcgacttccaggcttagtccggtggttaacgtatcaatcgcccctttgcttgccgcgtaatcaacatattcccctgggctacccaaccgactggccacgctagagacattgacgatagcgccgccactgccaccatttttaagcgccatgcgttttaccgcctcgcggcagcagagaaaatatcccgtcacgttggtggaaagtactcggttgattcgctctgcggtaaggttttcaacggtgcactgggtaaacaagatcccggcgttattgaccagcgctgctagcggttcatcgtgctgatcgattgctgtaaacatcgcaacgacctggttttcgtcgctgatatccgcctggagcacgaatgctttgccaccggcttgcgttattaagttcatcacttcctgcgccgcgtggaggttttgctgataattaaccgccaccgtatacccttcttgcgccaacagtaatgcagttgcccgcccgatgccgcgactgccaccagtcacaagtgctatagccatttgtttttccgagaaaaattaattcgttgacgtatctttgagattgctaacaaactggctcaatcttcaatgttggcacgcttttccccctcgccctttcagggagagggccggggtgagggtaaatattcgcgccagtgccggcctgttcccctcaccctaaccctctccccaaaggggcgaggggactgtctgagcacttttgtactttgtcatctgactaaaaaggcgccgaagcgcctttagaaaatagtcgaatcagtgaattactggtattcgctaatcggtacgcaggagcagaacaggttacggtcgccgtaaacatcatccagacgtttcactgtcggccagtatttgtctgccacacctgccgggaataccgcaacttcacggctgtacggatgcgcccactcggcgaccagttcgctctgaatgtgcggcgcgttcaccagcgggttatcttccagcggccagacaccggctttcacctggtcaatttctgcgcggatagccagcatcgcgtcgataaagcgatccagttccactttgctttcagattcagtcggttcaaccatcagcgtacccgccaccgggaagctcatcgtcggcgcgtggaaaccgtagtcgatcaggcgcttggcaatatccagctcgctgatgccggtttcttctttcagcgggcgaatatcgagaatacattcgtgcgccacgcgaccgtcgcgaccggtatacagcaccgggaaggcatcctgcaggcggctggcaatatagttggcgttgaggattgccacctggcttgcttttttcagcccttctgcgcccatcatgcggatgtacatccagctgattggcaggatagaggcgctaccgaacggtgccgcagaaaccgcgccctgacgggttaacatgccttcgatttgcaccacgctatgacccggtacaaacggtgccaaatgcgctttcacgccgatcggtcccatacccggaccaccaccgccgtgcggaatgcagaaagttttatgtaggttaaggtgactaacgtccgcaccaataaagcccgggctggtgatgccaacctgggcgttcatgttcgcgccatcaaggtaaacctgaccgccgaactgatgcacgacttcacacacttcacggatcgtttcttcatacacgccgtgggtagaaggataagtcaccatgatacaggagaggttatcgcccgcctgttccgctttcgcgcgcagatcagtcagatcgatgttgccgtttttatcacacgccacaaccaccacctgcattcctgccatatgtgcagaagcggggttagttccgtgcgcagaagccgggatcaggcagatatcgcgatgcccttcgttgcggctttcatgataatgacgaatcgccagcaggcccgcgtattcgccctgtgcgccagagttcggctgcatacaaacggcgtcgtaaccggtcagtttcaccagccagtcagccagctgcgcaatcatctgctgataaccttcggcctgctccggcgggcagaacgggtgcagttcggcaaattccggccaggtgattgggatcatctcggcggcggcgttcagtttcatggtgcaggaacccagcgggatcatcgcctgattcagcgccagatctttacgctccaggctgtgcatatagcgcatcatttcggtttcgctgtggtagcgattaaacaccggatgggtgaggatttcgtcgtcgcgcagcatcgcaggctggatagagcggctgtcgtgagccacgtctttgtccagcgtgtcgatgtccaggccgtggttatcgcccagcagcacgttgaaaagctgcattacgttttcacgcgtggttgtttcatcaagggtgatcccaaccgcgttcagaatatcgctacgcaggttgatttcagccgcttcggcacgcgtcagtacgcccgctttgtcggccacttccacacacaaggtgtcgaaatagtgcgcatggcgcagtttcagacctttttgttgcaggcccgccgccaggatatcggtcagacggtgaatgcggttagcgatacgtttcaggccaaccgggccgtgataaacggcatacaggctggcgatgtttgccagcagtacctgggaagtacaaatgttggagttcgctttctcacggcggatatgttgctcgcgagtctgcatcgccatgcgcagcgcggtattgccagctgcatctttgcttacaccgataatacggcccggcatactgcgtttgtattcatctttcgccgcaaagaatgccgcgtgtgggccaccgtagcccatcggcacgccgaagcgttgcgcgctaccaaaaacaatatccgcgccctgtttacccggcgcagttaacagcaccagcgccataatatcggcggcaacgctgaccacaattttgcgacttttcagttcgctaataagcgcagtgtagtcgtgaatttcaccggtagtgcctacctgctgtaacagcacgccgaagacgtcctgatggtcgagcactttttgcgcgtcatcgacaatcacttcaaaaccaaaggtttcggcacgagtacggaccacatccagcgtttgcggatgcacatcggaagccacgaagaagcggttggcatttttcagtttgctgacgcgtttcgccatcgccattgcttcggcggcagcggtggcctcgtccagaagagaagcagaggccatatccagtccagtcaaatccagcgttacctgctggaagttgagcagtgcttcaaggcggccctgggagacttcaggttgatacggagtgtacgcggtataccagcccggattttccagcatgttacgcaggataaccggcggtagctgcacggcggtgtaacccatgccgatgtaagacgtgaagcgtttattgcgactggcaatagccttgagttctgccagtgcggcgtattcggtcgccggtgcgccaacctgcggtggtgtcgcaagttgaatatctttcggcacaatctggccggtcagcgcgtttaagctttgtgcaccaacggcattcagcatttcttgctgttgcgcggcgtccggtccgatatggcgttcaataaaagcgccgctgttttcaagctggcttaacgtctgtgtcatgagcgatggttcctgaaacgtgcagtgaattgtgaacctctctccttacgaagagagtgagggtgaggcataaattttcctcaccctgatcctctcccgcagaagaggaataaagccgttactcgtcttctaacaatgcttcgtatgcggtcgcatccagcagactttccagttcgctttcatcgctggctttgattttaaagatccagccgcctgcatacggttcgctgttcaccagttccggggaatcgctcagtgcgtcgtttaccgccacgatttcaccgcttactggcgcataaatgtcactcgccgcttttacgctttcggcaaccgcgcagtcatcgcccgcgctaaccgttgcgcccacttccggcaggtcaacaaacaccatatcgcctaacagctcctgagcatgttcggtaataccaacggtgtaagtgccgtcggcttctttacgcagccattcgtgttctttgctgtatttcagttctgctggtacgttgctcatcaatcaatctccaaaaaagtaaatcacgcgacggctttgccgttacgcacaaaaacaggttttgtcactttaaccggcatttcacggttgcgaatttgcacaatcgccgtttcgccaataccttccggcacgcgcgccagcgcaatgctgtaacccagcgtcggggagaaagtaccgctggtgataatgccttcatgctggttgccctgcgcatcggtaaagcgtaccggcagttcattacgcagcacgcctttttcggtcatcaccagaccaaccagtttttctgtaccatgctcacgctgcacttccagggcttcacgaccgataaagtcacgatctgccggttcccaggcgatggtccagcccatgttggcggctaaaggagagatggtttcgtccatctcctgaccataaagattcatgcccgcttccagacgcagcgtgtcacgcgcgcccaagccacatggcttaacacccgcttccaccagcgcacgccagaaatcggccgctttttcattgggcagcgcaatttcatagcccgcttcaccggtataaccagtggtggcaataaacagatcgcccgcctgcacgccaaagaacggtttcatcccttccaccgcctgacgctgggcgtcattaaacagtgtggcagcttttgcctgcgcattcggcccttgcacggcaatcatggaaaggtcatcacgaacggtaatttcgatgccgaaaggttcagcgtgttgggtaatccaggagaggtctttttcgcgggtggcggagttaacaacgaggcggaagaaatcttcagtaaagtagtagacgatgaggtcatctatcacaccgccagaggcattcaacatcccgctgtaaagggctttgccgcttttggtgagcttcgccacatcgttcgccagcagataacgcagaaactcccgggtgcggctgccgcgaagatcgacgatggtcatatgactcacatcaaacattccggcatcggtacgtaccgcatgatgttcgtcgatttggctaccgtaatgcagcggcatcatccagccgtggaaatccaccatgcgagcgccgcaaagcgtgtgttgttcgtacaaaggagtctgttgtgccatcttgtcctcattgaataagcggggctgacaactttttcatggtgaaattatcaccacgaaacccagcatcggagccactcccggtccccaacgcaatcgttctcttttgcctgaacttaccaccgaaacagactgttaaccataaggtaaaattgatcatcacattagcttatggttaaaaaatgcaaaaatcgcgacagaataaaaaaccaaaaaatacaccagtttctatacaaagatgatgtgatgagaaagtcaatttgaataagacaatattaagagctaaaaaaatgtcaaaaaacactaaatcaaaaaataatggcattagaaaatataatgcgaaaacggaggtgaaattagtttatttcaaatgaggaaaatctcccggcgaaaaaaccgggagatgaaagtgtgatgggtatcaaataaacaacagaggagaaatttttaacgcagccattcaggcaaatcgtttaatcccattgcctggcggataagttgcggcttaacgccaggaagcgtgtcggccagtttcaaaccaatatcacgcagcagttttttcgccggattggtaccggaaaacagatcgcggaatccctgcataccagccagcatcaacgccgcactgtgcttgcggctacgctcatagcgacgcagataaatgtactgcccgatgtctttcccctgacgatgcaaccgtttcagttcggcaatcagctctgcagcatccataaagccgagatttaccccctgccccgccagcgggtgaatggtatgtgcggcgtcgcccaccagcgccagacggtggctggcaaactggcgcgcataacgccccgtcagtgggaacacctgacgcgcgctctcaaccttgcataagcccaggcgattatcaaaagcgatatttaacgcgcgattaaattcgtcttcacttgcctgctgcatccgctgcgcttcctctgggctcagactccagacaatgctgcaaagatgcggatcgctaagcggtaaaaaggccagaatgccttcgccatggaaaacctgccgcgccaccgcatcatgcggttcttccgtgcgaatggtcgctaccagcgcgtgatgctgataatcccagaaagtcagcggaatatcggctttgttgcgcaaccaggaattagcgccgtccgcgccaatcaccagacgcgccgttaacatgctgccatctttcagcgtcaggaaggtttcattttctccccaggcgacctgctgtaattctgcgggggctaacagagtgatatcactgctctgatgcgctttgttccacagcgcgtagtgaatcacactattttcaacgatatgcccaagatggctatagcccatgctttgatcgtcaaagctaatgtgaccaaagctgtctttgtcccacacttccataccgtgataacagctggccctacgagagagaatgtcctgccagacgccaagacgggtgagtaatttttcgctggcggcattgatagcgctaacgcgcagttgtggtggtgcattcgccgccagaggttcctgtacgcgctgctccagtacggcaacgcgtaagccgctcccctgtaagccacaggcaaccgccagccccaccatgccgccgccaacaatggctacatcaacactttgcattgtttattccttaaaaccgccttcaacgcgccacccaaccgagggtgcgctgcgccagcacatcgcgtgccggggtgaataattccatcgtcatcagcccgatgttgcgcccgacaaccagcggtgcccaacggttggcaaaaagatgtacaaggctgtccgtgacgccaatggttgcttcgcgatcgctctgtcgacgctgctgataacggcacaatacgccgtaatcccccatgtcttctccgcgctcctgcgcctgagtcagggtttccgcaagactcatcacatctcgcataccgaggttaaacccttgcccggcaatcgggtgcagagtttgcgccgcattgcccaccagcacggtacgatgggtaatagatctggcggcgtgggttaacgccagcggataagcactgcgtttaccagcgtgggtaattttcccaagtcgccagccaaaggcgctctggagttcacggcaaaacttctcgtcactccagctcaacacctcttcgcgccgttccagtggatgacaccagaccaggctacagcgtccgtcagacatcggcaacatcgccagcgggccatgttgcgtaaagcgttcaaaagcgcgcccttcatgcgcaacggaagtagcaacgttggcaatcacggccagttgttcgtaaggctcctgctgccagtcaacgccgcacgcggtggctaacgcactatgggtgccatcagctgctaccagcacgcggcccgtcagcgtctcgccactctccagcgtcacttcaacgtgactctgagtacgggcaacgttagccacgcgatcagggcaatgcagcgttacgccaggtgctttacgcagcaatgcaaacagccgttgcccgacattgtgcaattcgacaacctgtcccagcgccgccagttggtaatcttctgcggcgagggtgacaaatccagcgtgaccacgatcgctgacatgcacggtggtgatggcagttgcgcaatccgccagagattgccagacgccgatgcgcgccagttgctgacaggtacccgccgccagcgctatcgctcgtccatcaaagcccggatgagcatgactctctggcgcagtcgcttcaatcaaatgtaccggcagcgccccgtgacttaaccgggaaatagccagcgccagcgtcgcgcccgccatgccgccaccgacgatgattacgctcattgctttctcgcagcaaccatcaacgcttcgatttcttccggctttttcaccacgctggcggtgaggttttcgttaccggtttcggtaatcacaatgtcgtcttcaatacgaatgccgataccgcgatattgttctggcacttctgcatccggcgcaatatacagccctggctctacggtcagtaccatgcccggttccagaatgcggctgcgatcctgaccataaacacccacgtcatggacatccagtcctaaccagtggctaaggccatgcataaagaaaggacgatgggcgttctgagcgatcagttcatcaacatcacctttcaggatgccgagttttaccaggccgctaaccatgatgcgcaccacttcaccagtgacttccagaatggaagttcccggacgatacaggcgcaggctggtttcgagagactccagcacaatgtcgtagatttcacgctgggcctgggtgaatttgccgttgaccgggaaggtgcgggtaatatcgccagcgtaacctttgtattcacaacccgcgtcaatcaacaccaggtcgccgtcgcgcatttcacactcgttttcggtgtagtgcagaatgcagccgttttcaccgctgccgacaatggtgttataggacggatagcgcgcaccgtggcggttaaattcgtggtgaatttcgccttccagatggtactcgaacattcccggacggcatttttccatcgcccgtgtatgtgccatggcggtgatttctcccgcgcggcggagtacggcaatctcttctgggcttttgaacaggcgcatttcatgaacaacaggacgccagtcgatcatcgttgccggtgcggtgagattttgccggctacctttacgcagtttttccagcgcactgttcacgattacatcagcatatgcatattcgccctgggcatggtaaaccacatccaggccgttaagtagttgataaagttgctgattgatttcgctgaatgccagtgcgcggtcaacgcccagtttctctggcgcggcatcctggcctaagcgacggccaaaccagatctccgccgtcaggtcgcgaacgcggttaaacagaacgctgtggttatgagtgtcatcgcttttaatcagcaccagcaccgcttccggttcgttaaagccggtgaagtaccagaagtcactgttctgacgataggggtattcgctgtcggcgctacgtgttacttctggtgcagcaaaaatcagcgcggcgctgccgggttgcatttgctccaccagggcctgacggcgacgctgaaactcttgccgggatatctcactcataacactctccttacgttttttgtttttagtgtagagtcggtttttgtacttctggcgcggtcggttgcggatgagtaaaggtgtcgtggcataacagcgcggcaacacgaacgtattcgatgatctcttcaaggctcatttcaagctcttcctgatcttcgtcttcgtcgtaacccagttgcgcaatgttacgcagatcgtcgatagcttcaccggtttcgccggtcactttatccagcttcggttgcgtaacgccaagaccaagcaggaagtgattgacccaacctgccaatgcatcagcccgatcgaaaacgctgacatcatcgccatcaggcagataaagctgaaaaaggaagccgtcatcctgcagggcatcgctggtggcagagtgcattttacgcagtgcctgtgccagctcatgaccgaaagccatgccttcgttcgtcaggtcgtgaagtagcggtagccaactgctgtcatcgttaccgccacatatcatcccgctgattaaaccatgcatctcagctggggtcagacccgtcccttgttggttcagatactggttcatttcgttgtaaccaggcatttcgttctgtatagacataagcattcgtcgtcaaagggaggaatattcatgatatgctaccactttgggccctggtggaccagaaaagggcttgtctcttctcatcagggtagctatagtgtcgccccttcgcagaccatgggtctaaagacgaaggcagcgcagtcaatcagcaggaaggtggcatgtctgcacaacccgtcgatatccaaatttttggccgtagtctgcgtgtgaactgcccgcctgaccaaagggatgcgttgaatcaggcagcggacgatctgaaccaacggttgcaagatctgaaagaacgcactagagtcacaaatactgaacagttggtcttcattgccgcattgaatatcagctatgagttagcgcaagaaaaagcaaagactcgtgactacgcggcaagtatggaacagcgtattcggatgctgcagcagaccatagaacaagcgttacttgaacaaggtcgcatcaccgaaaaaactaaccaaaactttgaatgacacttttcggtttactgtggtagagtaaccgtgaagacaaaatttctctgagatgttcgcaagcgggccagtcccctgagccgatatttcataccacaagaatgtggcgctccgcggttggtgagcatgctcggtccgtccgagaagccttaaaactgcgacgacacattcaccttgaaccaagggttcaagggttacagcctgcggcggcatctcggagattcccttcttatctggcaccagccatgacgcaactaccagaactcccactgacattatcccgacaagaaatccgcaaaatgattcggcaacgtcgtcgtgcgttaacgccggaacaacagcaggaaatgggtcaacaagccgctacccggatgatgacttatcccccggtggtgatggcacatacggtcgctgtattcctctcttttgatggcgaactcgacacccagccactcatagaacaactctggcgcgccggtaagcgcgtatatcttccagttttgcatccctttagtgccggtaatttgctgttcctgaattaccatccgcaaagcgaactggtgatgaacaggttgaagatccatgagccaaaattggatgtgcgtgacgtgctacccctttcccgattagacgtgctgatcacaccgctggtcgcctttgatgagtacggtcagcgcctgggaatgggcggtggtttttatgatcggaccttacaaaactggcagcactataaaacgcaaccggtgggttatgcgcatgattgtcagttggtggaaaaactccccgttgaagagtgggatatccctcttcctgcggtggttacaccgagcaaagtctgggagtggtaagggcgatacacccgcatcgccctgattgacatcgttgattctttgacctaatttagtgagtaagggtaagggaggattgctcctcccctgagactgactgttaataagcgctgaaacttatgagtaacagtacaatcagtatgatgacaagtcgcatcataacccttctccttcaagccctcgcttcggtgagggctttaccgttacagccccatgctgccctgccatcgtaaatccccattaaataaacacaacgcattgatctgactttgatttattttctggagcagactcgcaaagtagaatgcgcaacgcggcaacggtgtggagaagggataaaaaaacgggcaagtcagtgacctgcccgttgattttcagagaaggggaattagtacagcagacgggcgcgaatggtacccggaatagctttcattgcctgcagcgctttttcggcaacgtcttcgtcggcttcaatatcaataaccacataacccatctgggcggaagtttgcagatattgcgcggcgatgttgacgccctgctcggcgaagattttgttcagcgcagttagcacgcccggacggttttcgtggatgtgcatcagacgacgcccaccgtgcagtggcaggctgacttccgggaagttcaccgcagagagcgtactgccattgtcagaatacttgatcaatttacccgcaacttccaggccgatattctcctgcgcttcctgagtgctaccgccaatgtgtggcgtcagaaggacgttgtcgaattcacacagcggagaggtaaatggatcgctattggtcgccggttccgtcgggaatacgtcgattgccgcccccgccagatgtttgctcgccagcgcatcacacagcgccggaatatccaccacagtaccgcggctagcattaatcagcaggctgccgggcttcattagactaatttctttcgcgcccatcatatttttggtggacggattctctggtacatgcagactcaccacatcgctcatattcagcaggtcagaaagatgctgtacctgagtggcgttgcccagcggcagtttattttcaatatcataaaagtaaacatacattcccaggctttcagccagaatgcccaattgcgtaccaatatgaccgtagccgatgatacccagctttttgccgcgcgcttcaaaagaacccgccgccagtttgttccacacgccacggtgcgctttagcattggcttccggcacgccgcgcaatagcagcagcagttcgccaatcaccagctccgcaacagagcgcgtattactgaacggtgcgttaaataccgggatcccgcgctttgccgccgcatccagatcaacctggtttgttccgatacagaaacagccaatagcgaccagtttttctgcggcgttgatcacgtcttcagtcagatgggtacgggatcgcaggccgatgaagtgggcatcgcggatggattcttttaattgttcatcatccagcgcgcctttgtgaaattcgatgttggtgtaaccagctgcacgaaggctttccagcgccttttggtgcacgccttctaccagcagaaacttaatcttgtctttctccaggcttacctttgccatttacccaatcctgtcttttgaaatgttgtgtgcggatttgcatccgcctttcaacatatcaaaaaataatattgcggcaatatgaacgtttgcgtcgcgatgttgaggaaatatcacgcaaaggtaattcttggatgaatatgctggtttagaggatttatttagagcaatcgacaattgcctggtaaaagcgtgacacatgtcaccaaatttaatgaagagaatttttttaacgggggaggttcccccgtcagatcatttcacaatggttttgacaccgtcaggtgtgccaatcagcgcaacgtccgcgccacggttagcaaacaagccaacagtcaccacgccaggaatcgcatttatggcgttttccatcgctatcgggtcaaggatttccatgccgtggacgtcgaggatcacgttgccattatcggtcaccacgccctgacggtattccggacgaccgcccagtttcaccagctgacgcgccactgcactacgtgccatcgggataacttctactggcagcgggaatttacccagaatatcaacctgcttggaagcgtctgcaatacagataaatttttctgcaacgctagcaatgattttttcacgggtcagcgccgcgccgccgcctttgatcatttgcatgtggccgttgatttcatctgcgccatcaacgtagatgccaaggctgtcgacttcgttgagatcaaaaacgtgaatgccgaggcttttcagtttttcagtggaagcatcactactggaaacggccccttcaatctggcctttcattgtaccgagcgcgtcaataaagtgtgcggcggtggaacctgtacctacaccaacaatggtgccgggctgaacatactgaagtgccgcccatcctactgcttttttcaattcatcctgcgtcatgatcgtttcgcctgtggtatgaaatttcacacgcattatatacaaaaaaagcgattcagaccccgttggcaagccgcgtggttaactcatccataaaatatcgcgcaatggcaggcatcccctttcgccccgcaaataaagcatacaacggtctgggtatgccgctccacggtgcaaacaggcgcaccagttcaccgttcgcaagcccctgtttacaggcaaattgaggcaataacgccacgccattcaacacaaccagggcgcgaactcgctgagcgaaatgcattagcgcaaatccctgatcttttaagctgcgcttttaaccacggatacaaatgttacccgccgacggcttcggtatatgcaacctgacacaaaattgtgtcatagtgcaggaaaaagcatttaccaggagcagacaacagcaatgaaacgcccggactacagaacattacaggcactggatgcggtgatacgtgaacgaggatttgagcgcgcggcacaaaagctgtgcattacacaaagtgccgtcagtcagcgcattaagcaactggaaaatatgttcgggcagccgctgttggtgcgtaccgtaccgccgcgcccgacggaacaagggcaaaaactgctggcactgctgcgccaggtggagttgctggaagaagagtggctgggcgatgaacaaaccggtagcactccgctgctgcttagtctggcggtcaacgccgacagtctggcgacgtggttgcttcctgcactggctcctgtgttggctgatagccctatccgcctcaacttgcaggtagaagatgaaacccgcactcaggaacgtctgcgccgcggcgaagtggtcggcgcggtgagtattcaacatcaggcgctgccgagttgtcttgtcgataaacttggtgcgctcgactatctgttcgtcagcagtaaaccctttgccgaaaaatatttccctaacggcgtaacgcgtagcgcattactgaaagcgccagtggtcgcgtttgaccatcttgacgatatgcaccaggcctttttgcagcaaaacttcgatctgcctccaggcagcgtgccctgccatatcgttaattctagtgaagcgttcgtacaacttgctcgccagggcaccacctgctgtatgatcccgcacctgcaaatcgagaaagagctggccagcggtgaactgattgacttaacgcctgggctatttcaacgacggatgctctactggcaccgctttgctcctgaaagccgcatgatgcgtaaagtcactgatgcgttactcgattatggtcacaaagtccttcgtcaggattaatccatcaaataatgcctgatagcacatatcaggcgttgtcctcacttctttttgtattccttgaatcacatcacaaaatagacaaatctcaggcggcaaaaaacgacgtctgaatgcattttttttgctggcgacaaacccacgtaaaaagctcaccgtaggcgcaaataccctcattttgattgcgttttacggagcaaataatgtctaacgtgcaggagtggcaacagcttgccaacaaggaattgagccgtcgggagaaaactgtcgacagcctggttcatcaaaccgcggaagggatcgccatcaagccgctgtataccgaagccgatctcgataatctggaggtgacaggtacccttcctggtttgccgccctacgttcgtggcccgcgtgccactatgtataccgcccaaccgtggaccatccgtcagtatgctggttttagtacagcaaaagagtccaacgctttttatcgccgtaacctggccgccgggcaaaaaggtctttccgttgcgtttgaccttgccacccaccgtggctacgactccgataacccgcgcgtggcgggcgacgtcggcaaagcgggcgtcgctatcgacaccgtggaagatatgaaagtcctgttcgaccagatcccgctggataaaatgagcgttagcatgaccatgaatggcgcagtgctaccagtactggcgttttatatcgtcgccgcagaagagcaaggtgttacacctgataaactgaccggcaccattcaaaacgatattctcaaagagtacctctgccgcaacacctatatttacccaccaaaaccgagtatgcgcattatcgccgacatcatcgcctggtgttccggcaacatgccgcgatttaataccatcagtatcagcggttaccacatgggtgaagcgggtgccaactgcgtgcagcaggtagcatttacgctcgctgatgggattgagtacatcaaagcagcaatctctgccggactgaaaattgatgacttcgctcctcgcctgagcttcttcttcggcatcggcatggatctgtttatgaacgtcgccatgttgcgtgcggcacgttatttatggagcgaagcggtcagtggatttggcgcacaggacccgaaaagtctggcgctgcgtacccactgccagaccagtggctggagcctgactgaacaggatccgtataacaacgttatccgcaccaccattgaagcgctggctgcgacgctgggcggtactcagagtctgcataccaacgcctttgacgaagcgcttggtttgcctaccgatttcagtgcacgcattgcccgcaacacccagatcatcatccaggaagaaagtgaactctgccgcaccgtcgatccactggccggatcctattacattgagagcctgaccgatcaaatcgtcaaacaagccagagctattatccaacagatcgacgaagccggtggcatggcgaaagcgatcgaagcaggtctgccaaaacgaatgatcgaagaggccagtgcgcgcgaacagagcctgatcgaccagggcaagcgtgtcatcgttggtgtcaacaagtacaaactggatcacgaagacgaaaccgatgtacttgagatcgacaacgtgatggtgcgtaacgagcaaattgctagcctggaacgcattcgcgccacccgtgatgatgccgccgtaaccgccgcgttgaacgccctgactcacgccgcacagcataacgaaaacctgctggctgccgctgttaatgccgctcgcgttcgcgccaccctgggtgaaatttccgatgcgctggaagtcgctttcgaccgttatctggtgccaagccagtgtgttaccggcgtgattgcgcaaagctatcatcagtctgagaaaagcgcctccgagttcgatgccattgttgcgcaaacggagcagttccttgccgacaatggtcgtcgcccgcgcattctgatcgctaagatgggccaggatggacacgatcgcggcgcgaaagtgatcgccagcgcctattccgatctcggtttcgacgtagatttaagcccgatgttctctacacctgaagagatcgcccgcctggccgtagaaaacgacgttcacgtagtgggcgcatccagtctggctgccggtcataaaacgctgatcccggaactggtcgaagcgctgaaaaaatggggacgcgaagatatctgcgtggtcgcgggtggcgtcattccgccgcaggattacgccttcctgcaagagcgcggcgtggcggcgatttatggtccaggtacacctatgctcgacagtgtgcgcgacgtactgaatctgataagccagcatcatgattaatgaagccacgctggcagaaagtattcgccgcttacgtcagggtgagcgtgccacactcgcccaggccatgacgctggtggaaagccgtcacccgcgtcatcaggcactaagtacgcagctgcttgatgccattatgccgtactgcggtaacaccctgcgactgggcgttaccggcacccccggcgcggggaaaagtacctttcttgaggcctttggcatgttgttgattcgagagggattaaaggtcgcggttattgcggtcgatcccagcagcccggtcactggcggtagcattctcggggataaaacccgcatgaatgacctggcgcgtgccgaagcggcgtttattcgcccggtaccatcctccggtcatctgggcggtgccagtcagcgagcgcgggaattaatgctgttatgcgaagcagcgggttatgacgtagtgattgtcgaaacggttggcgtcgggcagagcgaaacagaagtcgcccgcatggtggactgttttatcagcttgcaaattgccggtggcggcgatgatctgcagggcattaaaaaagggctgatggaagtggctgatctgatcgttatcaacaaagacgatggcgataaccataccaatgtcgccattgcccggcatatgtacgagagtgccctgcatattctgcgacgtaaatacgacgaatggcagccacgggttctgacttgtagcgcactggaaaaacgtggaatcgatgagatctggcacgccatcatcgacttcaaaaccgcgctaactgccagtggtcgtttacaacaagtgcggcaacaacaaagcgtggaatggctgcgtaagcagaccgaagaagaagtactgaatcacctgttcgcgaatgaagatttcgatcgctattaccgccagacgcttttagcggtcaaaaacaatacgctcagtccgcgcaccggcctgcggcagctcagtgaatttatccagacgcaatattttgattaaaggaatttttatgtcttatcagtatgttaacgttgtcactatcaacaaagtggcggtcattgagtttaactatggccgaaaacttaatgccttaagtaaagtctttattgatgatcttatgcaggcgttaagcgatctcaaccggccggaaattcgctgtatcattttgcgcgcaccgagtggatccaaagtcttctccgcaggtcacgatattcacgaactgccgtctggcggtcgcgatccgctctcctatgatgatccattgcgtcaaatcacccgcatgatccaaaaattcccgaaaccgatcattagcatggtggaaggtagtgtttggggtggcgcatttgaaatgatcatgagttccgatctgatcatcgccgccagtaccagtaccttcagtatgacgcctgtaaacctcggcgtcccgtataacctggtcggcattcacaacctgacccgcgacgcgggcttccacattgtcaaagagctgatttttaccgctagcccaatcaccgcccagcgcgcgctggctgtcggcatcctcaaccatgttgtggaagtggaagaactggaagatttcaccttacaaatggcgcaccacatctctgagaaagcgccgttagccattgccgttatcaaagaagagctgcgtgtactgggcgaagcacacaccatgaactccgatgaatttgaacgtattcaggggatgcgccgcgcggtgtatgacagcgaagattaccaggaagggatgaacgctttcctcgaaaaacgtaaacctaatttcgttggtcattaatccctgcgaacgaaggagtaaaaatggaaactcagtggacaaggatgaccgccaatgaagcggcagaaattatccagcataacgacatggtggcatttagcggctttaccccggcgggtagcccgaaagccctacccaccgcgattgcccgcagagctaacgaacagcatgaggccaaaaagccgtatcaaattcgccttctgacgggtgcgagtatcagcgccgccgctgacgatgtactttctgacgccgatgctgtttcctggcgtgcgccatatcaaacaagctccggtttacgtaaaaagatcaatcagggcgcggtgagtttcgttgacctgcatttgagcgaagtggcgcaaatggtcaattacggtttcttcggcgacattgatgttgccgtcattgaagcaagcgcactggcaccggatggtcgagtctggttaaccagcgggatcggtaatgcgccgacctggctgctgcgggcgaagaaagtgatcattgaactcaatcactatcacgatccgcgcgttgcagaactggcggatattgtgattcctggcgcgccaccgcggcgcaatagcgtgagcatcttccatgcaatggatcgcgtcggtacccgctatgtgcaaatcgatccgaaaaagattgtcgccgtcgtggaaaccaacttgcccgacgccggtaatatgctggataagcaaaatcccatgtgccagcagattgccgataacgtggtcacgttcttattgcaggaaatggcgcatgggcgtattccgccggaatttctgccgctgcaaagtggcgtgggcaatatcaataatgcggtaatggcgcgtctgggggaaaacccggtaattcctccgtttatgatgtatagcgaagtgctacaggaaagcgtggtgcatttactggaaaccggcaaaatcagcggggccagcgcctccagcctgacaatcagcgccgattccctgcgcaagatttacgacaatatggattactttgccagccgcattgtgttgcgtccgcaggagatttccaataacccggaaatcatccgtcgtctgggcgtcatcgctctgaacgtcggcctggagtttgatatttacgggcatgccaacagtacacacgtagccggggtcgatctgatgaacggcatcggcggcagcggtgattttgaacgcaacgcgtatctgagcatctttatggccccgagcattgctaaagaaggcaagatcagtaccgtcgtgccaatgtgcagccatgttgatcacagcgaacacagcgtcaaagtgatcatcaccgaacaagggatcgccgatctgcgcggtctttccccgcttcaacgcgcccgcactatcattgataattgtgcacatcctatgtatcgggattatctgcatcgctatctggaaaatgcgcctggcggacatattcaccacgatcttagccacgtcttcgacttacaccgtaatttaattgcaaccggcagcatgctgggttaatgactcgtcccgtcacgatcttcagcaatatgctgaagcatcgtggcggtataacgatgatttctgatactataaagatattcctgcatatacatcggcctgtgcggtgcatcaaaatatttcagcgttgccggattcaccagtcgccaggcaaaatgcgggatcaccgtcagaaaatgtccgcgctccacggcgctgattttggccataaaactgtagggacgataaataatggttggattgatcccacaaggtcgcatattcgcatcaatcattgcttcgaagttggcccggttctgaaagcgcatttgtagccagggcagctcctgaagcagctcttgctcttgtcgctcttcataacggcgagaaacgagaaagcctaatcgcagcggtggtagttcactgatagtcaggttttccagttcctgaactcgtgcagatacatgctgtggggagataataaaatctaactggcggtcaaaaagattatcgataacgccattttcgctgaactcaactggctgggcggtcacgccttcatacttatctccgagactaatcaactgatcgaaaataattgtcggataagtattatctatgccaatcacaatttctcgactacgacgcccactgttatggatttcattatcaatcgcagaaagccgttgataaaccgggaacagtttttgatacagttcctgtccggctttattgaggctgatattattatctttgcgggtaaatagcgtatagccaatttgttcttccagcgcggcaatgcttttaccaaatgggctagccgtcatatggattttttctgccgcccgggcaatattattggtttgcgctaataaaatgaaattgcgcatctttttgctaataaaaatgtccatccccctcccccgcatccttgtccgcttaaccgtttcagtcagcctatccttgatgaaaccgcgagcaaagataggtgattacgtcatggttttacagaaaattacagaaaaaggaggcaatatcgggtaaaggcattagcccgacgaatacgtcgggctacaaatattattgtgctgcaggtgttttagcgggttgttgatccacaggttctaactggaagaccacatcgacctgatcatcaaactgaatagcggcctgctcgtaagtttcctgggcggacaccggcgcggcatcggctttcatcatccgcaccattgggctgggctgatagttggaaacatggtagcgcacgctatataccggccccagtttacgatgaaagccgttcgccagttcctgcgcctgatgaatcgcgttatcaatcgctgccttacgcgctttgtctttataggcatccggctgcgccacgcccaggctcacagaacgaatttcgttaagacccgccttcagcgcgccatccagcaaggaattcagtttgtctaactgacggagcgtgacttccaccgttctcacagcgcggtagcctttaaggatacttttaccatcctgataatcataatctggctgggtgcgtaagttcgcactgctgatatcttttttcgcgatctgattgagttcaaggaaggaaatgtattgtgcgacgcgctcatctgcctgtttcttggcagtagcggcatccttcgcggccacgttaacttcaatcgcaagagtggcaatgtctggcaccgcatccacgcttgccgtaccggaggtgacaatatgcggtccatccggcaattcgttagcctgcgctgccatcccgctaatacccattaatgccgccagggcgataactttgaacttcacgttagtctctccgtgttaattgacttgcccaaaattcaggacctctggaggcaagcttagcgcctctgttttatttttccatcagatagcgcttaactgaacaaggcttgtgcatgagcaataccgtctctcgccagctgcaaggcaataaaccacataacacatcccacaaccagattgataatgcgctgtgcttttgccgtgcgcagacgcggtgccagccaggctgcgagaagagccagaccaaagaaccacaggaaagaggcgctaattgtcccgagtgcaaaccagcgttttggttccacatcaagttgcccgccaaggctgcccagtacaacaaaagtatccaggtaaacatgcggattcagccaggtcactgccaacatggtggcgataattttccatctgccttgcttcatgacttcggcgctggctaactcaatattactgctcattgctgttttaaaagcgccaaaaccataccacagcaagaaggctacgccgccccaggtgaccagcgccagcaaccacgggctctgcatcaataacgcgctgccaccaaaaatcccggcgcaaatcaggaccaaatcgctgatagcacaaagtaaggcaatcataatgtggtactgacgacgtatgccctgattcatcacaaaagcattttgtggaccgagcggtaggatcatagccgccccaagtgcaagaccttgaaagtaataagaaaacacgttggatattccgaattaagtatctgatgcagagactatatcgcgggattgttattagcggaaattgataatattaattggcaatcagaaaaactaataagagagaggccagagagtattatctggcctcagcgttgattacgcagctttgtcttctttcacccgcttaaagttcacatccatttgcgggtacgggaagctgataccggcggcatcaaattcacgtttaatacgctccagcacatcccagtacacgttttgcagatcgccgctgttgctccagacgcggaccacgaaattaatgctgcttgcaccaagttcgttcaggcgcacagtcatttcgcgatctttcaaaatgcgatcttcagactggataatattggtcaggatctgcttaacctgatcgatatcggaatcatacgccacgccaataataaattcgttacggcgaactggctcgcgggagaagttaataatatttccggcaataattttaccgttcggaataacgataattttaccgtctgcagtacgcatggtggtggagaaaatctgcacactcagcacagtaccggctacgccgcccaggtcaacatattctccggcacggaacgggcggaacatgacaagtaacacgccagcggccaggttagacagactcccctgcaaagccagaccaacagctaagcctgcggcaccgagtacagcaatgacactcgcggtttgtacacccacgcgtcccagtgcagcgattagcgtaaaggcgataataccgtaacggactaatgcagaaagaaaatcagcaacagtggcatcgattttacgggagatcatcaggcgattcaccgcgttggaaatcatccgcgcgataatcaaaccaacgatgatgatcgcgagtgccgccacgatgtttactgcataacttagcagcagcgcctggttagctaccagccagcttcccgcgccgtttatgctatcgacaacattcaaatcttccattcaatattccttttcaactgactcaaaatggagaaatacactccgccgccttatgacgggcagtctgacaagggtaaacaataaagcataattttgccaaatagatcacagatttctcatctgaatcaccttgcttttggcgaaaaaatccccgcagagcggggctcagacagatatcaatgtgcgctttgtcatgccggatgcggcgtgaacgccttatccggcctacaaaaacctgcaaattcaatatattgcaggatacgtgtaggcctgataagcgtagcgcatcaggcaattttgcttttggcgaaaaaaagacccgcagagcgggccttgagataagcagaaaggaatatcttacagaacgtcgatcgcgttcagttcctggaatgctttctccagacgagcgatcatgctagtctgaccggcacgcagccatacgcgcggatcgtagtatttcttgttcggctgatcttcgcctttcgggttacccagctgaccctgcagataagcttcgttcgctttgtagtagttcagaacgccttcccaggttgcccattgggtatcggtatcgatgttcatttttactacgccgtagcttacggagtctttgatttcctgagcagtagaaccggaaccaccgtggaatacgaagttcaggctgttgtgcggcaggttgtgtttcttggaaacatattcctgagaatcacgcaggatggtcggagtcagaaccacgttacccggcttgtaaacaccgtgtacgttaccgaaggacgctgcgatggtgaaacgcgggctgattttgctcagttcggtgtatgcgtaatcaacgtcttccggctgggtgtacagtgcagaagcgtccatgtggctgttgtccacgccgtcttcttcaccaccggtgcaacccagttcgatttccagagtcatgccgattttggacatgcgctccaggtatttagagcagatttcgatgttctcttgcagagattcttcagacaggtcgatcatgtgagaagagaacagcggcttaccggtagctgcgaagtgtttttcacccgcgtccaacagaccgtcgatccacggcagcagtttcttcgcgcagtggtcagtgtgcaggataaccggaacaccataatgttcagccatctggtgaacgtgatgcgcaccagagatcgcgcccaggatagcagcaccctgcggaacgtcagatttcacgcctttaccagcgataaaggaagcaccaccgttggagaactgaacgataaccggcgctttaactttagcagcggtttccagtacggcgttgatggagtcagtaccgacgcagtttactgctggcagtgcgaagttgttttcttttgctacctggaaaactttctgtacgtcatcaccagtgattacgccaggttttacgaaatcaaaaatcttagacatgtctcttgtcctgtatcgtcgggccttatactcgtcatacttcaagttgcatgtgctgcgtctgcgttcgctcaccccagtcacttacttatgtaagctcctggggattcactctcttgtcgccttcctgcaactcgaattatttagagtatgaaaaattgcgtgctctaaaagcgcgctgaaacaagggcaggtttccctgccctgtgattttttacttcttagcgcgctcttcgagcatcgctactgcaggcagtactttaccttccacgaattcgaggaatgcgccgccgccagtggagatgtaggagattttgtcagcaatgccgaacaggtcgattgctgccagagtgtcgccgccgccagcgatggagaacgcttcgctgtctgcgatagcgttagccacgatttcagtacctttgcggaagttcgggaattcgaacacgccaaccggaccgttccacagaatggttttcgcattcttcaggatttcagccagttcctgagcggaagcatcaccgatatccaggatctgctcgtcagctttcacatcgttaacagatttcagggtagccggtgcagtttcagagaactcggttgctacgcgaacatcagacggaaccgggatgttgcaggtggtcagcagacgtttagcttcgtcaaccaggtcagcttcgtacagggatttacccacatcgtggccttgtgccgcgataaaggtgttagcgataccaccaccaacaatcagctggtcagcgattttagacagggagtccagaacggtcagtttggtagatactttagaaccaccaacgatagccaccatcgggcgagcaggttctttcagtgctttacccagcgcgtccagttcagctgccagcagcgggcctgcgcacgcaacgtcagcgaatttaccgataccgtgagtagaagcctgcgcgcggtgagcagtaccgaatgcgtccattacgaacacgtcacacagtgcagcgtattttttggacagggtttcgtcgtctttcttctcgcctttgttgaagcgaacgttttccagaacaaccagttcaccttcagcaacgtcaacgccgtcgaggtaatctttaaccagacgaaccgggttagacagtttgtctttcaggtagttaacaaccggcagcagagagaattcttcgttgtactcgccttcggtaggacgacccaggtgggaagttaccatcacttttgcgccttgtttcagggccagttcgatggtcggcagagaagcacggatacgcgcgtcgctggttactttcccgtcttttactggtacgttcagatccgcacggataaatacacgtttcccagcaagatccagatcggtcatcttaattacagacatggtgaatcctctcgttgattctaaaagttttgcagacgctgcttgcgtcttacctgaaagcaacagtagccatagctaacgtcgtgtcgagcattcggttagcaaagccccattcgttatcgcaccagaccaacgttttgatcaggtgtgcgccactgacccgggtttgggtgccatcgacaatggcactgtgcggatcgtggttaaaatctacagagaccaacggcaattccgtatagtcaactataccatgaaatgcaccttgtgctgctttttgcagcaacaggttgacttcattggcttttacaggtttcttcaccgtcacgcttaaatcgattgccgtcacatttatggttggcacacgtaccgcaatcgcttcaaagcgatcgttaaattgcggaaaaaatcgtgtgataccggcggccagtttagtatcgaccggaatgatgctctggctggctgcccgggtgcgacgcaggtcaggatggtatgcatcaataacctgttgatcgtgcatggcggagtgaattgtggtcacagtgccggactcaataccgtacgcatcatctaacaatttgatgacgggaattatgcaattcgtggtacaggaagcgttagaaacgatgcggtgttccgcacgaagttgatcctgattgacgccgtaaacaacggtcgcgtcgagatcgttactgccaggatgactaaagagcacttttttggccccggcggcaatatgcgcttcgccatgctcgcgggagccatatacgccggtgcagtcgaggactacatcaacgccaagttcacgccaggggaggctttgcagactacgttcatgcaatacgcggatggcgtcatcaccaacaaaaagttgatcgcgttcctgtcgtacttcccatgcaaaacggccatggctggtgtcatatttcaacaaatgcgccatgcccgcagcatccgccagttcgttgattgccaccacggtaatttccgcccggcgtccggattcatacaaagcacgaaccacattacgcccgatgcgaccgaagccatttatcgctacgcgtacggtcatagatctcctgcaaggttttccctgagcaaatttgccagacagagtaatccagcaaatcgtccggggaaaccttacctgtcgcaaactgcgactgattggttaattgtcgaacatttaatcgactgaaacgcttcagctaggataagcgaaacgtggaataaaaggaatgtttgtccagccgaagaagacatttatctgactcacatcacacttttatccccttttgtgggaagctttattccaggctggcgtaataataaccctacaataactggaataaattgtcagcttgtgaagtgataccggccttcttcagtcatctctactatcagattggcctgacggctattcatcagcacacgctcgacattggggccatcggtgcgggcataaaatgcttcggctacttgccgcgttaatcctcccgcaattttacgactaatcaagcgctcccgcagaatttgagcaggtgcatgaataaaaatagaaaaatcgcagaaagatgccaactccagccacttttcatcatccagtaacaaccagtttccttcgacgatgacgagtggtgcggtaacgtgcaacgcatcttcaacaggatcatgcttttgtcgatcgtactgcggccacgtacaatccccttccacgacctggcgcagattttccgtcagtttcgcaacgtcaaatgtctctggtgcgcctttgaaggggcgcaattgatgcgcatccagccagctattgtaatggtgaaaaccatccatcgggagcgtctgaatagcgggcagttccgggtcttgttgcgcgagatattcccagaaggtggttagggtacttttacccgtccccggcggagcgcaaagaaaaaccaccgtacgccgctgcggatttaccgtctgtaaggccgccaacatgtgcagcaacggtttatgtacattttcaatctcttcgttctggtactgtgcctgtatcttcagcccattcaccgttaattcaattttcacggcgttaattcctttaaggtggtcgttactgccagcgtcagcgccgttttgaccattccgctaaaacgcgcctcactccagacggagaaatcagcgaacttcatcgcttttaacgcgtcatagagcatcgcattgcgggttatgctattgacgttgctgataaaatcccaggtcatgtcatcggcaaatccgggcgtttcatcctgttcgttcaggtaatgccagaactgggaaaaatgcgtgatatcggcgtacaaccatttatccattttcccaacgcataaatcaaacgcagtgcaacatcaatatcgtcaagcgggccgctttgggcgagtaacggcttcactgcatattccacgatctcttcatcgttatcgacaaacaggctcggcagaaactggcgtatcccctggagcaaaatggtatgcgcagttttcataaaactaaataaattgtcctgtgcatccagttgctcaagcacatcatcttctgtcagcgtcgccattggtcttccgatagatcaccatcaatgcagggagtctattatattacacgtttggtccgcgccgccgatcagtaatgtctgcgtccgcaccccattcgccgtctgttggataccgttcaccagctcaccgcccgtcacgcccgtagcgctaaagaggatatcgttccccctcaccagttcatcgaggctgtacacacggttaacgtcaacgcccattgccttgcaacgcttgcgctcctgctctgcaatctgccgattttccgtgtaatcccctttagcctggcaaaagtcaatcagctcggcctgcatatccccgcctaatgctttaacggcacaggcagaaatcacgccttctggcgcaccgccgatggtgtacatcacatcgtaaggattatcctgccagcaggtcagcacgctggcggcgacatcgccatccggcagggcaaaaaccttcacgcccagctgtgttgcttcctcaatcgcggcactcaggcgcggtttatccagcgtaaccatgcgcagcttatccagcggtttgcctaacgctttcgccacgttgcgcaggttgtccgtcagaggcaaagacagatcaatcgcgcccgccgccagccgattaacaaccagctttttcatatacatatcgggcgcatgtaacaggctatctcgaggggcgaaagccatgaccgccagcgcattgctctgccccatcgccaccatccgcgtgccttcaatgggatcaaccgcgatatcgacttctggcccatcgcctttgcccacctcttcgccaatccacagcatcggcgcatggtcaatttctccttcgccgataaccactcgtccacgaaaagcgacgtcgtttaatgcctggcgcatcgcggtgaccgccaggccatcaattttatttttgtcgccacatccggtttgcggccaggcagccaacgctgcctgttccgtaacgcgaaataatggccacgccagggacatcattgcgcggcctccccgatatcaacgccaaattgtgccagcagatatttctcggcctgttcattccagatgccgtgcgtttcctcaaccagccgcgccaactctttaaacagcggatcggttttgcctttttcggcaaaatcggcaatggcagtgagcggcatggtcacgccgttataaatgagttttttaccgccagggatatccggcagattgagcacggtttctggcaccgcatccaggccaccgatatgggtcaccataaagctcggctgtaactgcccagtggcgctaagggcaatcgcctctttcatgtcgtccgtactaccgccagatgtaccgacgacgtgcgtgctgttgtaatggacgttgtagaaattaaacggcactttgaagtttttatccgtcggcccggcaaagaagttcagacagccatcttccgccagtaattcatcagccatctcaacgacagcaggcaccgccgcataaacaaaaatgtcatcgaacccggcatctcctgtcagcgcccgcagcatctggacaggatcgctcatccctttggtattcacatacaccagctcaatgcctttactggccgccagttccaccggcagcagcttctgtacctgcgccagacgtttgtcgtcgatatcgaccaccaccacccggctcggttgtatgccgccgttaatggcgtaatcgatagcgccaatgcccatcggacctgcacacgccagcagtgcaatattgccgccaggtttgacgcccatgcgatgctcataaacatattgcgtggtgtgataattggcatgataagcaccaataatgcagcacataggctctgccaggctcgccgcagcaaaataagagccgtgatacggtaatacgcagcccaaattaatggcgatttcgggaataatcatataagtggcattgccgccaaaatattcgtagctgtagcccgcactatatccgcttggtaaccccatcgccggttgcaatacaaaacgctggccttttttatatttgccagtgagatttttacccacttcgacaataaccccggcacattcatgcccggtaatgaccggatgattttctaaatcgtcgggtacgcgtttatgttcactaccgagtaacgccgctttccaggtgcttaaacagacgctgtcagaaattacactcaccagtaattcattatcggtaatttctggcagttcaaatacgcgcagacggacatcccgcttgccataaatagcagcaactttggttttcatttttacctctgtaatcagtgtttatgttcggcggttaattgattaaataaagtgtcgagttttggatcgccaatatagttattaatcaatatcagtggtttatccgtcacacgtttcacgcgcccttccagactggcatgagtaacgacgatatccgcatccgcaggcacgttttctatggcgtaatgttttacttcaattgccagccccgctttttccaggcgtttacggaaggtggtcgcgcccatcgcactggagcccatccccgcatcgcaaacaaaggcgatacgcttaaccctgcttaagctgaatgcaccctcttgtttcatcgccttaaccgcattggcactctgagcaaactcatcttcgctctccgtttccaccgttttttccatcttcagtatcaggctagtaatagcaaaggacaccagggtacctaccgtaacaccggcaattgtcgccaggaagctgcctttcggcgtcagtgccaggtaagcaaagatagaccccggacttgggccagccaccagaccaccgtccagtaagttaaacatccaggtgccagacataccgcccgcaatcatggcaataatggtcagcggcttcatcagcacatacgggaaatacagttcgtggatcccaccgaggaagtgaataatcatcgccccgggcgcagaacgtttactcatccctttaccaaacaaggtaaacgccagcagcagccccaggcccggacctgggttagaggccaccataaagaagatggatttaccgttaacgctagcctgttgcattcccagcggataatagacgccctgatcgatcgcattattgaggaaaagcactttcgccggttcattgatgacactcaacaatggcagataacccgcatgtaccagcgcctcaatacactctttgacgaaagtattggcaattaacaccgccgggccgataacttcaaaacccagcagacaaaggagcatccccgcgatacctaaactgaagttattgataaccatctcaaaaccggcaggtatgcgtttttccagtgccttatcgacatattttatgaccaacccaccgagcggccccatgatcatactgccaaggaacatcgggatctctgcgccaacgatcacaccaatagtacctattccgcccatgaccgccccgcgtttaccgccgaccagatgaccacctgtagaaccaatcatcacgggcaataaataggtaatcatcgggccgacaattttggcgaaatgttcgttaggcagccaaccggtgggaataaataacgcagtaataaaaccccaggcaataaaagcaccaatattggggatgaccattgcagtcaaaaagcccccaaaagcctggacctttgcacgagcagacttgttttccataatattatcctgtagaggagagagtaattatccgcggctgataatgtccgctaattgtttttcactacttgctgttaagagttgttcgagtatttcttcttcgcacagtaattcacttaacgcctgaatagcgccaatgtggctatcggcatcggcagcagagagtccgatgagtaatttaattggttcgtcattccccggaaaataaacaccttgttcaagtaatgtcaaagacatcccggttttaagcgccccacattccggtcgcgcatgaggcattgccacgcctggtgcgagaatataataagggccattgttaatggtggaatctttaattgcctgaatgtaattctcgctgatatagtttttatccagcaaacttaccatgctgaaatcgatagcttcctgccaatcttttgcactatgtataacactgatactactttctggaaaataatcactaagccgcataaattatccttattttatttttagggtaccgtccggcggtaaaaataaaatactcgtgcggtttaatgaaagcaattgagcagggaaaccggtgttttgaaaacagtgaattattaatttcttatataacattgagttatagatataacaacaaatgtcaatacgcatatcgtgatgcatattacataattgatatttattgcatataaatatttgtgatctacaacacgccttatctattgcttgtccgcaaacggacatatcaaggtaataaaaaaggtcgccgaagcgacctttttacccgaaatgctaattacagcagttcttttgctttcgcaacaacgttatcaacagtgaagccgaactcttcaaacagcagctctgccggagcagattcaccgaaggtggtcataccgacgatagcaccgttcaggccaacatacttgtaccagtagtcagcaatacccgcttctacagcaacgcgtgcagtaaccgctttcggcagtacggattcacggtaagcagcatcctgcttgtcaaatgcgtcggtagacggcatggacaccacgcgcgctttcacgccttcggcagtcagtttttcgtaggcagcaacagccagttcaacttcactaccggtagcgatgaaaatcagttccggctgaccggcgcagtctttcagcacataaccaccgcgcgcgatgtttgccagttgctcttcagttcgttcctgctgcgccaggttctgacgggagaggatcagtgcggtcgggccgtcctgacgctcaacaccgtatttccacgcgaccgcggattcaacctggtcacacggacgccatgtagacatgttcggggttacgcgcagagaagcgacctgctcaaccggctggtgagtcgggccgtcttcgcccagaccgatggagtcgtgggtgtaaaccatcacctgacgctgtctcatcagcgcagccatacgtacggcgttacgtgcgtattccacgaacatcaggaaggtggaggtgtacggcaggaagccaccgtgcagggagataccgttagcaatcgcggtcataccgaactcgcgaacaccgtagtggatgtagttacccgcagcatcttcgttgattgctttagaaccagaccacagggtcaggttagacggcgccaggtcagcagaaccgccgaggaattccggcaacagcggaccgaacgcttcgatagcattctgagacgctttacggctggcgattttcgccggattagcctgcagtttagcgatgaactctttcgctttagcgtcgaagtcagacggcatttcgcctttcatacggcgggtaaattcagcggcttcctgcggataagctttcgcgtaagcagcgaatttctcgttccatgcggattctttcgcctggcctgcttctttcgcatcccactgagcatagatttcagacgggatttcgaacggcgcatatttccagcccagttgttcgcgggtcagggcaatttcagcgtcgcccagcggcgcaccgtgggagtcgtgggtaccggctttgttcggggaaccgaaaccgatgatggttttgcacatcagcagggaaggtttgtcagtcactgcgcgcgcttcttctactgcgcgtttgatagatgccgcgtcatgaccgtcgatgtcgcgaataacgtgccagccgtaagcttcgaaacgcattgcggtgtcgtcggtgaaccagccttcaacgtgaccatcgatagaaataccgttgtcatcgtagaatgcaatcagtttacccagcttcagcgtacccgccagagagcaaacttcgtgggagatgccttccatcatgcagccgtcgcccatgaaggcgtaggtgtagtggtcgacaatgtcgtggcccggacggttaaactgcgccgccagcgttttttctgcaatcgccataccgactgcgttggcaataccctgacccagcggaccggtggtggtttccacaccagcggtgtaacccacttccgggtgacccggagttttagagtgcagctgacggaagtttttcagttcttccatcggcagatcgtaaccggtgaggtgcagcaggctgtagatcagcatggagccgtggccgttggacagcacgaagcggtcacggtcagcccaggacggattctgcgggttgtgtttcaggaaatcacgccacaggacttcggcaatgtcagccatacccataggggcacccgggtgaccggatttggctttctgtactgcgtccatgctcagcgcacgaatagcattggcaagctctttacgactggacattttgactccagatcggatgatgaagggcacgcccttaacgacttgacgacagcgcgttttgggctacgccggaaaatttgccaacaatttaccacaagccgcgcgtcatgtacatggaacatccttttgccgcttcagaaatctctggatcatgctcgcatgttgcgcaatctactcgcccgtccgctgcgcttttccttatactgagactgagcgtcgattcacctgcaaacggcgcatttttagaataatcctgaccttgtgcggaagagaaaacatgaaaattcgcgccttattggtagcaatgagcgtggcaacggtactgactggttgccagaatatggactccaacggactgctcagtagtggagcggaagcttttcaggcttacagtttgagtgatgcgcaggtgaaaaccctgagcgatcaggcatgtcaggagatggacagcaaggcgacgattgcgccagccaatagcgaatacgctaaacgtctgacaactattgccaatgcgctaggcaacaatatcaacggtcagccggtaaattacaaagtgtatatggcgaaggatgtgaacgcctttgcaatggctaacggctgtatccgcgtctatagcgggctgatggatatgatgacggataacgaagtcgaagcggtgatcggtcacgaaatggggcacgtggcgttaggccatgtgaaaaaaggaatgcaggtggcacttggtacaaatgccgtgcgagtagctgcggcctctgcgggcgggattgtcggaagtttatctcaaagtcaacttggtaatctgggcgagaaattagtcaatagccaattctcccagcgccaggaagcagaagccgatgattattcttacgatcttctgcgccaacgcggcatcagcccggcaggtcttgccaccagctttgaaaaactggcaaaactggaagaaggtcgccaaagcagtatgtttgacgaccatcctgcatccgccgaacgcgcccagcatattcgcgatcgcatgagcgcggatgggattaagtaaagcctggtggtgtcgaacgtaggtcagataaggcgttcacgccgcatctgacatgaatggcacatttgttaccttgtgcgcattgccggatgcgatgctggcgcatcttatccggcctacgggtgccgaacgtaggtcggataaggcgttcacgccgcatccgacattaatggcacgttttacccgtgcgcatcgcatctggtgcttactcgccctttttcgccgcctgaatatacagcatttccagcgccagcgttgccgctgccagagcagtgatttcgctctgatcgtatgccggagccacttccactacgtccatcccaacaatgttgagatctttcaggccgcgtaccagtttaatagcgcgatcggaggtcaggccgccaatcactggcgtaccggtgcctggtgcaaaagcaggatccaggcagtcgatatcaaaagtcaggtaaaccggcatatcacccacaatctgtttcacttgggcgataacgtcatccacgctgcgatcgttcacctggcaggcgtccagcacggtaaagccgttgtctttatcaaactcggtacgaataccaatctgcacggaatgattcgggtcgatcagaccttctttcggcgcggtatagaacatagtgccgtggtcaaattcacaaccgttcgcataggtatcggtgtgggcgtcaaagtgtaccagcgccattttgccgaaatgcttcgcatgagcacgcagcagcggcagcgtaacaaagtggtcaccaccgaaagagagcatacgcttaccggcagccagcagcttctcggcgtgcgcctgcagcttttcgctcatctcacgggcatcgccaaaggcatataccagatcgccgcagtccacgacgttcagacgctcacgcatgtcgaaattccacgggaagcggttgtgttcccaggccagattcgtgctaacctgacggatcgctgccggaccgtggcgaccacccgcacgaccagaagtggccatatcgaacggcacgccagtaatcacccagtctgcatcgctgtcatacggctggaagttcatcggcaggcgtaaaaaaccaaaggcattggaaaccagactgttatcgtattgatgacctaaggtgctcatggatggactcctattacaaagtcgatataaaaaaacccttccgcgtcgttaggcccgacgaggaagggttggatttgtcacaataaattgtggcggattatcaccgctaaattaagcggattcaagtaacacaggacttactcatcttcaagataagtataaccgtacaaacctgcctcgaactcttcaaggaactgttgttgcagttcagcatcaagatcggttttcttcacttgatcgcggaactgggttaacagcgttttcggatcgagctgtacatattgcagcatgtccgccacggtatcgccttcgtcagacagttctacttctacgctaccgtcagggaagacgaacacgtcaaccgcttcggtatcaccgaacaggttgtgcatgttgccgaggatctcctgatatgcgccgaccataaagaaaccgagcatcggcggattctctggatcgtactccggcattggcattgtcgtggcaataccgtcaccatcaatatagtggtcgatagcaccgtcagagtcacaggtaatatccagcagcacagcgcgacgttccggcacttgatccagcccttccagcggcagaaccgggaacaactggtcgatcccccatgcgtccggcatgctctggaacaggctgaagttgacgtacattttgtccgccatacgttcctgcagctcgtcgataatcggacgatgagcacggttttgcggatccagctgcttttgcacttcatggcacatgctcaaataaagctgctcagcccatgcacgttcttgcaggctaaagatgccggaagagtagccgatatgaatgtcgtgcagatccatctgactgtcgtgtaaccattcacgcagagaacggcgagttcccggttcgtgcatctcctgccaggtttcccacatgctttgcagcgcgcgcggcgcatcttctgcaggcgcggtcggcaccgtgtattcgttacgttccacgccgatgatattagacaccagcacggtgtgatgcgcagtcaccgcacgaccgctttcggtgattaccgtcggatgcggcagaccgttttcttcacacgcatcgccaatcgcccagataatgttgttggcgtattcattgaggccgtagttcacgctacagtcggactggctacgagtaccttcataatccacgcccagaccgccgccgacgtcgaagcactgaatattgacgcccagcttgtgcagttccacatagaaacgcgcggattcacgaacgcctgtcgcgatatcgcgaatattcgccatctggctaccgaggtggaagtgcagtagttgcaggctgtcgagacgcccggcttcacgcagggtttcaaccagttgcagtacctgagtcgcagccaggccgaacttgcttttttccccgccggaggactgccatttaccgctaccctggctagccagacgtgcacgcacgcccagacgaggaacgacattcagacgttctgcttcatccagcacaatggcgatttcactcatcttctcaatgaccagatagaccttgtgccccatcttctcgccaattaatgccaggcggatatattcgcggtctttataaccgttgcagacgatgacgctacgggtcatgccagcatgtgccagtactgccatcaactcggctttggaaccggcttccagacccagcggttcgccgctatgaatcagggactcaatcacgcggcggtgctggttaactttgatcggataaacaaggaagtaatcgccgttatagccgtaggattccctcgcacgtttgaacgcggcgttaatggaacgcaaacggtgctgcaggatctgtgggaaacagaacagtgcaggcagacgctggccctgtgcttcacgagttttcactaactgcgcgagatcgacgcgagcttccgggacgtccgggtccgggcacacgctaatgtggcccagctcgttaacgtcatagtagttattgccccaccaggcaatattgtaagtacgcagcatcttgctggcttcctgggagctcattgcaacctcctgcatggagcgtagtacaccgtgttcgcccgcactgctaggcaaacccatagacatgtcgtcagacatagcgaacctcaaattattttattaagtgtaaaacagttaacgactatcgcagcctggaactggcttaacaacccataagcacatggattttccagcagactatgctgacgctccaactgcgcaaccggtttctttttcataacattattaagcacataaccgaacgtaagtgtgaaagttcggcgaaaccacgagaaaactcttgtttttacaagagcgcccttgttcagtcctcagtaactgtaaccagctcttgaatcctgagaagcgccgagatgggtataacaagcgcaggtatgcaaagcagagatgcagagtgcggggaacgaatcttcaccagaacggtgagacaggttaagcagcagacaacggttcattatttcgtaagtcctccacggccgcctgttaagacgaacccacaagccaaaactctgattagtacccggctggaagtggcaacacgaaagaaacgtcgtgtgctttttatttaagccgcgcgccgcgttttataccccacaatggcagaaaattgcaaaagataaatacgcagaatgccggcattgtcaggaaaaatttccagccacgtttttaacagaatgagacagctttcaaaaaaaagtggaaatagggtgaagaattgacctaaaatagccatccagatgttaatccatccataccgattaacactcagactgccagtgtttttaacctgcagagtcgtggtaggatccgctaccacagaaaatccacacaacagtttgagctaaccaaattctctttaggtgatattaaatatggcaaaacacctttttacgtccgagtccgtctctgaagggcatcctgacaaaattgctgaccaaatttctgatgccgttttagacgcgatcctcgaacaggatccgaaagcacgcgttgcttgcgaaacctacgtaaaaaccggcatggttttagttggcggcgaaatcaccaccagcgcctgggtagacatcgaagagatcacccgtaacaccgttcgcgaaattggctatgtgcattccgacatgggctttgacgctaactcctgtgcggttctgagcgctatcggcaaacagtctcctgacatcaaccagggcgttgaccgtgccgatccgctggaacagggcgcgggtgaccagggtctgatgtttggctacgcaactaatgaaaccgacgtgctgatgccagcacctatcacctatgcacaccgtctggtacagcgtcaggctgaagtgcgtaaaaacggcactctgccgtggctgcgcccggacgcgaaaagccaggtgacttttcagtatgacgacggcaaaatcgttggtatcgatgctgtcgtgctttccactcagcactctgaagagatcgaccagaaaagcctgcaagaagcggtaatggaagagatcatcaagccaattctgcccgctgaatggctgacttctgccaccaaattcttcatcaacccgaccggtcgtttcgttatcggtggcccaatgggtgactgcggtctgactggtcgtaaaattatcgttgatacctacggcggcatggcgcgtcacggtggcggtgcattctctggtaaagatccaagtaaagtggaccgttccgcagcctacgcagcacgttatgtcgcgaaaaacatcgttgctgctggcctggccgatcgttgtgaaattcaggtttcctacgcaatcggcgtggctgaaccgacctccatcatggtagaaactttcggtactgagaaagtgccttctgaacaactgaccctgctggtacgtgagttcttcgacctgcgcccatacggtctgattcagatgctggatctgctgcacccgatctacaaagaaaccgcagcatacggtcactttggtcgtgaacatttcccgtgggaaaaaaccgacaaagcgcagctgctgcgcgatgctgccggtctgaagtaatctttcttcacctgcgttcaaaggccagcctcgcgctggcctttttcttttggataggcgttcacgccgcatccggcaaaaaaaccgcccgcacaataacatcattcttcctgatcacgtttcaccgcagattatcatcacaactgaaaccgattacaccaaccacaacagacaaagatttgtaatattttcatattattattcggttttcacagttgttacatttcttttcagtaaagtcttaattgcagataacagcgtttaatctatgatgatataactcaattattttcatgcacttaaatcataactaagataaatgttagtgtaagcgattacactgatgtgatttgcttcacatctttttacgtcgtactcacctatcttaattcacaataaaaaataaccatattggagggcatcatgcctgacgctaaaaaacaggggcggagtaacaaggcaatgacgtttttcgtctgcttccttgccgctctggcgggattactctttggcctggatatcggtgtaattgctggcgcactgccgtttattgcagatgaattccagattactagccacacgcaagaatgggtcgtaagctccatgatgttcggtgcggcagtcggtgcggtgggcagcggctggctctcctttaaactcgggcgcaaaaagagcctgatgatcggcgcaattttgtttgttgccggtagcctgttctctgcggctgcgccaaacgttgaagtactgattctttcccgcgttctactggggctggcggtgggtgtggcctcttataccgcaccgctgtacctctctgaaattgcgccggaaaaaattcgtggcagtatgatcagcatgtatcagttgatgatcactatcgggatcctcggtgcttatctttctgataccgccttcagctacaccggtgcatggcgctggatgctgggtgtgattatcatcccggcaattttgctgctgattggtgtcttcttcctgccagacagcccacgttggtttgccgccaaacgccgttttgttgatgccgaacgcgtgctgctacgcctgcgtgacaccagcgcggaagcgaaacgcgaactggatgaaatccgtgaaagtttgcaggttaaacagagtggctgggcgctgtttaaagagaacagcaacttccgccgcgcggtgttccttggcgtactgttgcaggtaatgcagcaattcaccgggatgaacgtcatcatgtattacgcgccgaaaatcttcgaactggcgggttataccaacactaccgagcaaatgtgggggaccgtgattgtcggcctgaccaacgtacttgccacctttatcgcaatcggccttgttgaccgctggggacgtaaaccaacgctaacgctgggcttcctggtgatggctgctggcatgggcgtactcggtacaatgatgcatatcggtattcactctccgagcgcgcagtatttcgccatcgccatgctgctgatgtttattgtcggttttgccatgagtgccggtccgctgatttgggtactgtgctccgaaattcagccgctgaaaggccgcgattttggcatcacctgctccactgccaccaactggattgccaacatgatcgttggcgcaacgttcctgaccatgctcaacacgctgggtaacgccaacaccttctgggtgtatgcggctctgaacgtactgtttatcctgctgacattgtggctggtaccggaaaccaaacacgttagcctggaacatattgaacgtaatctgatgaaaggtcgtaaactgcgcgaaataggcgctcacgattaatctccccaagcttcctcccatcgcggaggaagccacctcttgcagtcatcttttcttcgctctatcctctgccgctatgaaaacatcccgtctccctatcgccatccaacaggccgttatgcgtcgcctgcgggaaaaactcgcccaggccaacctgaagctagggcgtaactacccggagccaaaactctcttacacccagcgcggaacctccgccggaacggcctggctggaaagctatgaaattcgcctcaatcccgttttgctgttggaaaacagtgaagcttttattgaagaagtggtaccgcacgaactggcacatttgctggtatggaaacatttcggccgcgtagcgccacatggcaaagagtggaagtggatgatggaaaacgtgctgggtgttcccgcccgtcgtacgcatcagttcgaactgcaatccgtgcgtcgcaacaccttcccctaccgctgcaagtgccaggagcatcagcttaccgtacgccgccataatcgcgtagttcgtggcgaggccgtctatcgctgtgttcactgcggtgaacagctggttgcgaaataaccatctgaactatcaggaactttcctgatttggctgattgcataccaaaacagctttcgctacgttgctggctcgttttaacacggagaagtgcctacactagcgggattctttttgttaacccctaccccacgcgtacaaccgcgtggggagacgacgcggatttttaactatgcgtatcccccgcatttatcatcctgaaccactgaccagccattctcacatcgcgctttgcgaagatgccgccaaccatatcgggcgcgtactgcgcatggggccggggcaggcgttgcaattgtttgacggtagcaaccaggtctttgacgccgaaattaccagcgccggcaaaaaaagcgtggaagtgaaggtgctggaaggccagatcgacgatcgcgaatctccgctgcatattcacctcggtcaggtgatgagccgtggtgaaaaaatggaatttactatccagaaaagcatcgaactcggtgtaagcctcattacgccacttttttctgagcgctgcggcgttaaactggatagtgaacgtctgaacaagaagcttcagcagtggcagaagattgcaattgctgcctgtgagcagtgtggtcgtaaccgggtgccggaaatccgtccagcgatggatctggaagcctggtgtgcagagcaggatgaaggactgaaactgaatcttcacccgcgcgccagtaacagcatcaatacgttgccgttaccggttgaacgcgtccgcctgctgattggcccggaaggcggtttaagcgcagatgaaattgccatgactgcccgctatcaatttactgatatcctgttgggacctcgcgttttgcgtacagagacaactgcgctcaccgccattaccgcgctacaagtacgatttggcgatttgggctaacggagaagaataatgatcaagctcggcatcgtgatggaccccatcgcaaacatcaacatcaagaaagattccagttttgctatgttgctggaagcacagcgtcgtggttacgaacttcactatatggagatgggcgatctgtatctgatcaatggtgaagcccgcgcccatacccgcacgctgaacgtgaagcagaactacgaagagtggtttagcttcgtcggtgaacaggatctgccgctggccgatctcgatgtgatcctgatgcgtaaagacccgccgtttgataccgagtttatctacgcgacctatattctggaacgtgccgaagagaaagggacgctgatcgttaacaagccgcagagcctgcgcgactgtaacgagaaactgtttaccgcctggttctctgacttaacgccagaaacgctggttacgcgcaataaagcgcagctaaaagcgttctgggagaaacacagcgacatcattcttaagccgctggacggtatgggcggcgcgagcattttccgcgtgaaagaaggcgatccaaacctcggcgtgattgccgaaaccctgactgagcatggcactcgctactgcatggcgcaaaattacctgccagccattaaagatggcgacaaacgcgtgctggtggtggatggcgagccggtaccgtactgcctggcgcgtattccgcaggggggcgaaacccgtggcaatctggctgccggtggtcgcggtgaacctcgtccgctgacggaaagtgactggaaaatcgcccgtcagatcgggccgacgctgaaagaaaaagggctgatttttgttggtctggatatcatcggcgaccgtctgactgaaattaacgtcaccagcccaacctgtattcgtgagattgaagcagagtttccggtgagcatcaccggaatgttaatggatgccatcgaagcacgtttacagcagcagtaacccaccttagcgagaaggatctcgttgagactctgagtgacagcgcccttctttccacgcatactgggcgctgttgcttttttgaaccaggaaacagaacctctgacaatgaatttacagcatcactttcttattgccatgcctgctctccaggatccgattttccgtcgttccgtggtctacatttgcgaacataataccaatggtgcaatggggatcatcgtcaacaagccgctggaaaatctcaaaattgaagggattctggaaaagctgaagatcacgccggagccgcgtgatgaaagtatccgtctggataaaccggttatgctcggcggtccgctggctgaagatcgcgggtttattttgcatactccgccctccaattttgcttccagcattcgcattagtgacaacacggtaatgaccacttcccgcgatgtgctggaaacgctcggcaccgataaacaaccgtctgacgtattggtggctctgggttatgcctcctgggagaaaggtcaactggaacaagaaattctcgataacgcgtggctaacggccccggcagatctgaatattctgttcaaaacgccgattgccgaccgctggcgcgaggcggcaaaactgattggtgtggatattctcaccatgcctggtgtggcaggacacgcctgatgagtggaaccttactcgccttcgacttcggcaccaaaagcattggcgtagcggtcggccaacgcattaccggcaccgctcgccctttgcctgcaattaaagcacaggacggtacgccggactggaacattatcgagcgtttactgaaagagtggcagccggacgaaatcatcgtcggtttgccgctgaatatggacggcaccgagcaaccattgactgccagagcgcgtaaatttgccaaccgtattcatggccgtttcggtgttgaagtaaagctccatgacgagcgtcttagcactgtggaagcccgttccggtctgtttgaacagggcggctatcgggcgctcaacaaaggcaaagttgactctgcctctgcggttattattctcgaaagctatttcgagcagggatattaaggcgatttaaacgcctggcggagtgtaaataatatcatcgcgtcttattgccggatgcggcgtgaacaccttatccagcacacatctggcagcggctataggtctgataagacgcgttagcgtcgcatcagacatttattgcctttgtaggcccgataagcttgcgcatcgggcatggcaacgtcacaaacgcccttcccccacccggtgctgataactctgctgaaacgttatcatccccacctgctgcccggtttgaataacatgcggtaactggtgggttttcccttcgcgaatcaaattccccaccgcgggtgtgttaatcagcaattcaaatagcgccacgcgtccttcctgtttatccacttccagcttttgactcagcactgcccgtaaactacctgccagttgattacgcacggggtctttttcctgcgccggaaaactatccaccagtcgctcaactgcctgcgcggcaccacgcgtatgtaatgttgccagcaccaaatgcccggtttctgccgccgtcagtgccagacggattgtctcgctgtcacgcagctctccgagcaaaatcacatcaggatcttcccgcaatgcggcccgcaatccgcttgcgaacgtcatacagtgcaaaccaatttcccgctgctggatcaaacatcgctggctggcatagagatattcaacaggatcttccagcgtcagaatatgcgcatcggcatgttgattgagatagccaaccatcgccgccagcgtggtagatttgccactccccgtcgcccccgtcaccagaatcaggccattctcgctcttgagtaattccggcaataccgttggtgcgccaagctgttcgagctgcgggcagtggctaggtaacagccgtaacgccaggctaatgccatgccgttgcgcgaatgcgctgccacgcaatcgctggttttccgccaggctcacggcaaaatccagctgaccattctccagcaatattgcccgctgatcgtcatccagccactcccgcagtagctcttcgacgtccggcgtatcaaacggcgcagcttccattctgccgcgaatgcgccatcgtgcgggccaggcgctgcacaggtgtagatcgctgacgttatgctttacactaagggccacaatttcttccatattcatactaagatcctcggaaaatgaacgatattgcgcataacctggcacaggtccgggacaaaatcagtgcggctgcaacgcgttgcggccgttctccagaagaaattacgctgcttgcagtcagtaaaacaaaacctgcgagcgccatcgcagaagccattgatgccgggcagcgtcaatttggtgaaaactacgttcaggaaggggtagataaaattcgccactttcaggaactgggcgtaacaggattagaatggcattttattggcccgttgcagtctaataaaagccgcctggtggcagagcatttcgactggtgtcataccatcgaccgtttgcgcatcgctacccgtctcaacgaccagcgcccggcagaacttccccctcttaacgttctgattcaaattaacattagtgatgaaaacagtaagtccgggattcaactggctgaactggacgagctggcagctgcggtcgctgaactaccgcgtttacgtctgcgcgggttgatggcaatccctgcgcctgagagtgaatatgtaaggcagtttgaagttgcacgccaaatggctgtagcatttgccggactgaaaacgcgctacccgcatatcgacacgctctctctgggaatgagcgacgatatggaagccgccattgcggcaggtagcacgatggttcgtatcggcactgcaatttttggtgcgcgtgattactctaaaaaataaggaattaaaggaacgccatgaatacgttgactttcctgcttagtacggtcattgagctgtataccatggtgctgttattacgcatctggatgcagtgggctcattgtgatttttacaaccccttcagtcagtttgtagtgaaggtaacgcagccaattatcgggccactgcgccgcgttattccggcaatggggccaattgacagcgccagcctgctggttgcctatattctcagttttatcaaagccatcgtgctgtttaaagtggtgaccttcctgccaatcatctggattgccggtttactgattctgctgaaaaccatcggcctgctgattttctgggtcctgctggtgatggcgattatgagctgggtaagccaggggcgtagcccgattgaatacgtgctgattcagctggccgatccgctgctgcgcccgattcgccgcctgctaccggcaatgggtgggattgatttcagcccgatgatcctcgttctgctgctgtatgtcatcaatatgggtgtcgcagaagtattacaggcaaccggaaatatgctgctgccagggctgtggatggcgttatgaatgccgtaacagttaatgatgacggtctggttttacggctctatattcagccgaaagccagccgtgattctattgtcggtttacatggcgacgaagttaaagtcgccattaccgcgccgccggttgacggccaggccaacagtcatctggtgaagtttctcggtaagcaattccgggttgccaaaagccaggtggtgattgaaaaaggcgaacttggccgccacaaacaaattaaaatcattaatccgcaacaaatcccgccagaaatcgcggcgttaattaattaagtatcctatgcaaaaagttgtcctcgcaaccggcaatgtcggtaaagtgcgtgagctggcgagcctgcttagcgacttcggtcttgatatcgtggcccaaacagacctcggcgttgattccgctgaagaaaccggcctgacctttatcgaaaacgcgattctgaaagcgcgccatgcggcaaaagtgaccgctttaccggcaattgccgacgactctggtctggcggtagatgtgcttggcggcgcgccgggcatttactccgcgcgttattccggtgaagacgcgaccgatcaaaagaatctgcaaaaactgctggaaacaatgaaagacgtaccggacgaccaacgtcaggcgcgtttccactgcgtgctggtatatctgcgtcacgcggaagatcccactccgctggtatgccacggtagctggccgggcgtgattactcgtgaaccagcgggcactggtggctttggttatgatccaatcttcttcgtaccttccgaagggaaaaccgccgccgaactgacccgcgaagaaaagagcgccatttcccaccgtggtcaggcgttgaaactgctgctggacgctttacgtaatggttaaattacctccgctgagtctctacattcacatcccgtggtgcgtgcagaaatgcccgtactgcgatttcaactctcacgcgttgaaaggagaagtgccgcacgacgattatgttcagcatctgcttaacgatctggacaacgatgtggcttacgctcagggccgtgaagtaaagacaatctttattggcggtggtacgccgagcctgctttccggcccggcgatgcaaacgctgctggacggcgtgcgtgcgcgtttgccgctggcagcggatgcagaaattactatggaagcgaaccctggcacggtagaagccgatcgctttgtcgattatcagcgtgctggtgtgaaccgcatctctattggtgtgcagagttttagcgaagaaaagctgaaacgacttgggcgtattcatggcccgcaagaagcgaaacgcgcggcgaagctggcgagcggtttagggttacgtagctttaaccttgatttgatgcatgggctgccggatcaaagtctggaagaggcgcttggcgatctacgccaggccattgaactgaatccgccgcatctttcctggtatcaactgaccatcgaacccaatacgctgtttggtagccgaccaccggtgctgccggacgatgacgcgttgtgggatatattcgaacaggggcatcagttattaaccgcagcgggttatcagcaatatgaaacttccgcttacgccaaacccggttatcagtgccagcacaatctcaactactggcgctttggtgactacatcggtattggctgcggcgcacacggcaaagtgaccttcccggatgggcgcattctgcgtaccaccaaaacgcgtcatccgcgtggttttatgcaaggaaggtatctggaaagccagcgtgatgtcgaagccacagataagccgtttgagttctttatgaatcgcttccgtctgctggaggccgcgccgcgcgtggagtttattgcgtataccgggctttgcgaagatgtgattcgcccacagttagacgaggcgattgcccagggttatctcaccgaatgtgcggattactggcagataacggaacatgggaagctgtttttaaatagcctgctggagctttttctggctgagtaaacttgtattgccggatgcggcgtgaacgccttatccagccgacatgtggcagcggttgtaggtctgataagacgcgcaagcgtcgcatcagacgttgattgccggatgcggggtcaacgccgcatcctgctacaaatcgtgcactatatcaaacttacttaatcaccccattgcgccgcagttgttcggtatcttttttccagcgttcattagcttggttgatatcgtcaattttcatcaaaatcgcgacttttttactgtttatttcactaactttcatcgttaacggatattgccctttttcgagcgttacccagtcatcctgcaatttacggctaagtttttgactttgcagaaaagtctgtcgccgttgttcgttgatatcgaaatctcgtttctgctgaatcggcacttcataacactcttcactctgtttatgacatgccgcaatcgccggttgataaacctctttgtcatatttaaccgcgaacgcctcgctatcgttctgtttattaaactcatcacgctgttggtgaatttttttaaaggcgtcttcgcgggtcatttgcttaccgtttgcatcttttccccaatatgcatccgctgctttctgcgccgccaccatttgcttatcaagcgctttcacttccttttccagcgcaggaatgctgttcttctgggtattcaacgcagattcaagctgactaaagcgataattgaaatcttcgctattcacgatcagatatttattattcgttttgatatcgtcgaccacccgcccacgatcgctggctgccgcctgaaaagagtaaaagttcacgctccagccagacgcgggcgttcctttactggttaacatcgcgctgaattttaccggtttatctttcgtccaggtctgttcgagcagttcgtaatctgccaactgaccgacccaggtatagagatcgtcactggaagagacatcgccttccgcactccaggtggcctgattacccttagcatcaagattttttaaggtgatagcatcaagcttgagaatgccgtgatactgctttttgaattgatcttttaagatattttcagttggcggttcgccatctgcccaggcattaccagtcatcaacataagcagtgccgtgccaacaatccattgctttttcacccgaaaaacctcacgcggaataatttattccggtgattatcattagggtaattaaaattggcaatggacgtgagtctgaagtgaaaaagccccggcacgataccggggcgaggcgattagtactgattgaagatctgctggatctgctgcggatctttggtttgcgtcagagccagttgcagcagaacgcgcgctttttgcgggttcagcgtgccagaggcgacgaagccgtatttcgcatcatccacttcggcatcctgagtggtagcgcccgtcggtacgcgggaagaacgcacgactgcagtaccggttttcgcggcggtcgccagcgtgtcgaacacagatttatacaggttgccgttacccacaccagcgctaacgatgccatcatagcccgcatctaccagtgctttagccggaagatcggatgcgttagcgtagttataaacaatgccgactttcggcagttcattcagcttagagacatcgaatggcgtgtcgctggtatgcttacgtgccggggtacgctggtagtcaatcttaccgttgtgaatgtaacccagaggaccgtagttaacagacttgaaggtcgctacgtcggtggtgttggttttggtgacgtcacggccatcaagcacggtgtcattcatcactaccagcacgccacggttggcggaggctttatcagctgcggtcactaccgcgttatacaggttgaatggaccgtctgcgctcatagacgtggacggacgcattgcgccgaccatcaccaccggtttgtcgcatttcaccgtcaggtcgaggaagtaagcagtttcttccatcgtgtcggtaccgtgggtaatgacgaagccgtcggtcttatcgcagtcggtgttaatttttttcgccagtgtcagccagacattatcgttcatgtcctgggagccgatattcactacctgctcgcctttaacgttcgcaatgtcttttagttgcggcaccgcattaaccagattttctacgccaactttacccactgtgtagttagatttggttgcggagtcaccaccaccggcaatggtcccgccggttgctaaaatggtgatattgggtaatgccaatgctgcaccactaaaacccataaccagtgcggcaagtgccgtctttttgaaaaactccatttcattcctccagttacgtgaacgctacgcattatcccttagctctgtatgggaaatttgacgttaaacaatttacaacgtgaatatattttggagatctacaaagttagaggcaggtaacaaaacgaagaattaaacggcataaaaaagtattatgccgtcttaaaatagaggattattttaaattcccgaccagggctttgcggctatcttccagagtcacaacgcggctacaaacatctttgccaaactgctggaaatctttttcctgctttttccactcggtttggatactggattgcagcccccccaggcttcccagcacattctgtaatgggttaccgccgctttttcagcaccgctttcgcgcccatttcattaatgctgtcctgtaaaattccacccattgcctgattcactaattgctggccttcggcgcgaacctgatcaatggctttatagtgaaacgtcaggccatcgctgcgcgtttcaataatgcggttcatctgctctttcagctgcgcatcaagtttggtcagacggctgcgcattttgctgctttcgcccatctcctgaacgataattttatccagagcaatacgggctttctcgacgcggcttttcgcgccttcatcaatccacggcagcgtgctgcgtagttcagcctgataatccttcgcctgctcgcgctgggcggcattcagggaatattgcttaccgttatacatcacgttgccgtctggcgtgatcaccagattgccgttttcgcccttcacctgcacggtttgcgggctgacaatcacatcgtcacgcggcgtgacgctgcactggtagtcggcgtgagcggtcattgccgtcacactaagtgctgccgccagcagcattttgcgcatcatagtcttccctcaagaaaaaatcaggccagcatttgctggccccagattgataacaaagtacgcgttttccatgccggatgcggcgtaaacaccttatcccgcctactcgatcgtgcatctttccaggcctgataagcgtagcgcatcaggcagttttgcatttgtcatcgcccgtatgctttcttagtcccaccaaacgtcgaaaagttcgctggtgcgtacctcatccagtttgcgctcttccagccacttacgcacaatcgcctgatgttcttcggtgcatttgccgatttcctgcatgcagatcagaccttcccaggccagataaccgctgccgtcaaaggccagtttgttcggttcgataacctcgttaataaaatcatcaacggttttatcaatctgttcttcgcttgtaccttccgggaatcgccatgccacgctaaatcctaattcctggaattcgtcgatgtgcatttttttacgcagacgacggctacggttctttgccattatttcaccctctcgaacattaagtcccatactccgtgaccaagacgatgaccacgttgttcaaatttcgtcaccggacgacttgccggacgcggtacgtaatcattgctctcactcaggtttttataaccgtcaatagaagacatcacttcaagcatatgttccgcataaggttcccagtcggtcgccatatggaatacgccccccagctgcagtttgctttttaccagttcggcaaacggcacctgaacgatacggcgtttattatggcgcgctttgtgccacgggtcagggaaaaagagctgcaccatgcgcaaactattgtcaggaatcattttatgcagcacttcaaccgcatcgtgacacatcacgcgcaggttgcttaaaccttcttcatgcgcagaagccaggcacgcaccaacgcccggactatgcacttcaatgccgaggaagtcctgctcagggcgatctttagccattgccaccaggctcgcccccatgccaaaaccaatctcaagcgtcaccggcgcttcacggccaaaaagcgcggggaaatccagcatatcttcgctgaactcaacgcccatcaccggccagtagttttccagcgcatgttcctggcctttggtcagtcgcccctggcggcgcacaaaactacggatacggcgcagtgggcggccgttttcatcaaattccggactaatgacgtcgtttttcataaaggtttagtcgcttgtgaaagtgttctgaaaacgggcattatccaaagttagttgccggatgcaagcatgataaggccgtggctgcggaaagttccggtttacaccctgccgtcgctgtgctgcaatcttgcccccaacaacagtgaattcggtgaccatgcaagcgagccaatttagtgcccaggttctggactggtacgataaatacgggcgaaaaactctgccctggcaaattgacaagacgccctacaaagtatggctcagtgaagtgatgttgcaacaaactcaggttgcgaccgttatcccctattttgaacgctttatggcgcgcttcccgacggtgaccgatctcgccaatgcgccgctcgacgaagttctccacttgtggaccgggcttggctattacgcccgcgcgcgcaatctgcataaagcggcacaacaagtggcgaccttacacggcggtaaattcccggaaacctttgaggaagttgcagcactgccgggcgtcgggcgttccaccgcaggcgcgattctcagcctttctctgggtaagcactttccgattctcgacggtaacgtcaaacgcgtgctggcgcgctgctatgctgtaagcggctggcctgggaaaaaagaggtcgagaataaattatggagtttgagcgagcaggtgacgcccgcggttggcgtggaacggtttaatcaggcgatgatggatttgggtgcgatgatttgtacgcgcagcaaaccgaaatgtagcctctgtccgctacaaaacggatgtattgccgccgccaacaatagctgggcgctttatccgggcaaaaaaccgaaacagacgctgccggagcgcaccggctactttttgctattacagcacgaagatgaagtattgctggcgcagcgtccgccgagcggattgtggggcggtttatactgtttcccgcagtttgccgacgaagaaagtttgcggcagtggctggcgcaacggcagattgctgccgataacctgacgcaactgaccgcgtttcggcataccttcagccatttccacttagatattgtgcctatgtggcttcccgtgagcagtttcaccggctgcatggatgaaggcaatgcgctctggtataacttagcgcaaccgccgagtgttggcctagcggctcccgtggagcgtttgttacagcagttacgcactggcgcgccggtttaacgcgtgagtcgataaagaggatgatttatgagcagaacgattttttgtactttcctgcaacgtgaagcagaaggtcaggattttcagctgtaccccggcgagctgggaaaacgcatctataacgagatctccaaagaagcctgggcgcagtggcagcacaagcaaaccatgctgattaatgaaaagaaactcaacatgatgaatgccgagcaccgcaagctgcttgagcaggagatggtcaacttcctgttcgagggtaaagaggtgcatatcgagggctatacgccggaagataaaaaataaaaacagtgccggagcacgcctccggcaacttgcataaaaacaaacacaacacgcacccggaatgatgaaaaaatatctcgcgctggctttgattgcgccgttgctcatctcctgtagcacgaccaaaaaaggcgatacctataacgaagcctgggtcaaagataccaacggttttgatattctgatggggcaatttgcccacaatattgagaacatctggggcttcaaagaggtggtgatcgctggtcctaaggactacgtgaaatacaccgatcaatatcagacccgcagccacatcaacttcgatgacggtacgattactatcgaaaccatcgccgggacagaacctgccgcgcatttgcgccgggcaattatcaaaacgttattgatgggtgacgatccgagtagcgtcgatctctattccgacgttgatgatattacgattagcaaagaacctttcctttacggtcaggtggtggacaacaccgggcagccgattcgctgggaaggtcgcgcaagcaacttcgcggattatctgctgaaaaaccgtctgaagagccgcagcaacgggctgcgtatcatctacagcgtcaccattaacatggtgccgaaccaccttgataaacgtgcgcacaaatatctcggcatggtccgccaggcgagtcggaaatatggcgttgatgagagcctgattctggcaattatgcagaccgaatcttcctttaacccgtatgcggtcagccgttccgatgcgctgggattaatgcaggtggtacaacatactgccgggaaagatgtgttccgcagccaggggaaatccggcacgccgagccgcagtttcttgtttgatcctgccagcaatattgataccggcaccgcgtatctggcgatgctgaacaatgtttatctcggcggaattgataacccaacaagccggcgttatgccgtcatcaccgcctataacggcggcgcaggcagcgtgctgcgagtctttagcaatgataagattcaggctgccaatattattaacaccatgacgccgggcgatgtttatcagacgctgacgacccgccatccctctgcggaatctcgccgttatctttataaagtgaataccgcgcaaaaatcctaccgccgccgataattccattaaccgcccctgacgatgctcaggggcaaaaatgttatccacatcacaatttcgttttgcaaattgggaatgtttgcaattatttgccacaggtaacaaaaaaccagtccgcgaagttgatagaatcccatcatctcgcacggtcaaatgtgctttttcaaacactcatccgcatcacgatgtgaggaaattaacatgaatcttaagctgcagctgaaaatcctctcttttctgcagttctgtctgtggggaagttggctgacgaccctcggctcctatatgtttgttaccctgaagtttgacggtgcttctattggcgcagtttatagcagtctgggtatcgcagcggtctttatgcctgcgctgctggggattgtggccgacaaatggttaagtgcgaaatgggtatatgccatttgccacaccattggcgctatcacgctgttcatggcggcacaggtcacgacaccggaagcgatgttccttgtgatattgattaacagctttgcttatatgccaacgcttgggttaatcaacaccatctcttactatcgcctgcaaaatgccgggatggatatcgttactgacttcccgccaatccgtatctggggcaccatcggctttatcatggcaatgtgggtggtgagcctgtctggcttcgaattaagccacatgcagctgtatattggcgcagcactttccgccattctggttctgtttaccctgactctgccgcatattccggttgctaaacagcaagcgaatcagagctggacaaccctgctgggcctcgatgcattcgcgctgtttaaaaacaagcgtatggcaatcttctttatcttcagtatgctgctgggcgcggaactgcagattaccaacatgttcggtaataccttcctgcacagcttcgacaaagatccgatgtttgccagcagctttattgtgcagcatgcgagtatcatcatgagcattagccagatctctgaaaccctgttcattctgaccatcccgttcttcttaagccgctacggtattaagaacgtaatgatgatcagtattgtggcgtggatcctgcgttttgcgctgtttgcttacggcgacccgactccgttcggtactgtactgctggtactgagcatgatcgtttacggttgcgcattcgacttcttcaacatctctggtagcgtgtttgtcgaaaaagaagttagcccggcaattcgcgccagtgcacaagggatgttcctgatgatgactaacggcttcggctgtatcctcggcggcatcgtgagcggtaaagttgttgagatgtacacccaaaacggcattaccgactggcagaccgtatggttgattttcgctggttactccgtggttctggccttcgcgttcatggcgatgttcaaatataaacacgttcgtgtcccgacaggcacacagacggttagccactaattacgcaaagaaaaacgggtcgccagaaggtgacccgttttttttattcttacttcaacacataaccgtacaaccgtttcacgccatccgcatcggtttcgctataaacaccttgcagctccgggctaaatcccggcaacaaattcaccccttcttccagtgcaaggaaataacgttgaaccgccccaccccagacttccccgggtaccacgcaaagcacgccaggtggataaggcaacgccccttctgccgcaattcgcccttcggcatcacgaatccgcaccaactccacgtcaccgcgaatataagcgctatgcgcatcctgggggttcatcaccacactcgggaaactctgctggcggaacatcgctttttgtaggtctttgacgtcgaaactgacatacagatcgtgcatctcctgacacaactggcgcagggtgtagtcgcgatagcgcaccggatacttgttataaacgctcggcaacacctcaaccagcgggctgtcatcctcaatatgctgttcaaattgcgccagcatcgccaccagttgtgccagcttctcgtggctttccgccggagttaataaaaacagaatggagttgagatcgcacttctccggcacaatgccgttctcacgcagatagtgcgccagaatcgtcgccggaacgccaaagtcgctatattcgccggtttcggcatcgatacctggtgtagtgagtaacagcttgcacggatcaacaaaatactgatccgcggcatatccttcaaagccgtgccacttcgcccccggctcaaaactgaaaaaacggcggtcgctggctaacacacttgtcggataatcctgccacaatttgccatcaacaacgggcgggataaacgggcggaacagcttacagcgcgcaagaatagccttgcgcgcttcaatccctatctcaacacactcagcccacagccgacgcccactctccccttcatgaattttggcgttaacatccagtgcagcaaacagcggatagaaagggctggtagaagcatggagcataaaggcgttattcaaccgcttatgcgggcaaaaacgcgcctgtccgcggatatggttatcttttttatggatctggctcgtctgactgaatcccgcctgctgtttgtgcacgctctgagtcacaaagatccccggatcgttttcgttaagttctaacagcagcgggctgctatccgccatcatcgggataaattgttcataaccgacccacgcggaatcaaacagaatgtaatcacacagatgcccaacggtatcgatcacctgacgggcgttatagacagtgccgtcataggttcccagctgaataatcgccaggcgatacgggcgcggcaggtcggctttttctggcgcaacgtcgcgaatttgctggcgcagatactcttcattaaaacagtgcgcatcaataccgccaatgaaaccaaacgggttgcgactagcttccagatagaccggcgtcgcccccgcctgaatcagcgcgccgtgatgattgctcttatggttgttacggtcgaagagcaccagatcgccacgcgttaacagcgcattcgtcaccactttattcgctgcgcttgtgccgttcagcacaaaataggttttatcggcatgaaagactttggctgcgaatttctgcgcatctttcgcgcttccttcatgaataagcagatcgcccaattttacgtcagcgttacacatatcggcgcgaaagacgttctcaccaaagaaatcgtaaaaatggcgtccggcaggatgctttttaaaaaacgcaccatgttgatgtccagggcaagcaaaggtgctgttgcccatctcaacgtactgcgtcagcgtgtcataaaacggtggcagcaaattctcttcatactgacaggctgcggattccagctccagccactgctgctcgttgccgttgattaccgccgtaacgcccgcaggtaattcaacagcatgttcggaatacaaaaacaccggtagatgaaaaccggtgcgcttaagcaacgcaagaatgccactgcgactatccgcagcggtaatgacgactgccgcgacgtccgtaaaatcagtatctcccaacgccaccacgcgacgatgagaagaaagtcgggataccagttcactactggcggcaatattcatacttttcataagcgcaaacccgtttcggggaagtaagaataccggacaaggtggaaaaccctgccccatgagatatgggtcaaactggtcaccagctccgaccgccagacatcagtaaaagcagaaacgctctgattttactgttgtcctgcagtgagcgtgcgttaacttcaccgcatgagcagtaacatagaaagggaaacgtttcgcgcgaaacggcgataagcgagagaatgtaaggagatggcgtgcatcgggcaaactccgtacagagaggagaaaattcgcgcaatcatggcacctttcgctaaagcgtgcaagccaggactttgcgaacaaacaagccatcgacggcaccaaacggtcataataagaaaatcaaacaatacagctaacaggaactcttgtggtcatcggcccttttatcaacgctagtgcagtcttactgggtggcgttctcggcgcactgctcagccaacgcttaccggaacgtatccgcgtctccatgacaagtatttttggtctggcaagcctggggattggtattttactggtggtgaaatgtgccaaccttccagcgatggttttagctacgctacttggcgctctaattggcgaaatttgtttgctggagaaaggtgtcaatacagcagtcgccaaagcacaaaatctgtttcgtcacagtcgtaagaagccagcgcatgaatcttttattcagaattatgtcgcgattattgtcctgttttgcgccagcggcaccgggatcttcggggcgatgaacgaagggatgaccggcgatccgagtattttaatcgccaagagttttcttgatttctttacggcgatgatcttcgcctgcagcctgggtattgcggtaagcgtgattagtatcccattactgatcatccagttaacgctggcgtgggctgccgcgctgattttaccgctgaccacaccgagcatgatggcagacttcagcgccgtaggcggtttattgctgctggcaaccggattacgcatctgtggcattaaaatgttcccggtggtcaacatgcttccagcactccttctggcaatgccgctttccgccgcctggaccgcctggtttgcctgacaatgcgtgcaatatcggcaaagtgatgatagattgtgcagtctgcagtaaattgaagaaatttgattgacgagacgaggcgaatcaggtttaatgcgccccgttgcccggatagctcagtcggtagagcaggggattgaaaatccccgtgtccttggttcgattccgagtccgggcaccactaattcttaagaacccgcccacaaggcgggtttttgcttttggatctgacaataaccttcacgaaaaaaattagcttataaagtctgggggaattactctcgccacgttaacgagagtaattttattgatattaatctcctgatactttacccccgtccaaactccagccgctgcacattcaccatcccaggcttctcagcagcactgacatcaatttgtgtcacccgcagcgcatagaacgccattttgaatttacgaacggacgcattatcagtgactttaacggcatgggcaaagtgaaatatcattttttaacgataaaaagagtgttatttcttgtgtatcagacaataagcattcattcaaaacctttagaaataatcaaaacacaggtattccactggttaatatattcacatatgaaatgaataaatattggaatatataaatattgaatattttgattaatccccgtactgattattcttcataatcagtacggggttgctacaacatgtattactttttcaccacaattaacggttcaatatcactctcttttttgatgaccagactttcatcaccgcgcaaacacgtcccaccgtagttgccgccaacggtgaaggtacatacctgaatgtatttaccgtccactttcggcaaacaccacagttgctgatagatgtttttctgctcggcaaatttaccgctggttttgtccagcacctcttcatgatggctgacgaggtcgatattgctgccacagcgaccggcgatcggtttcactgcgtaacctgttttcaccagttcatcattaacagtgaaatcggtatccagcaggtaacgatggtgcgggaacaggctccagaggatcggcagaatcgctttgttgccggggatcaccgtccacagcggctcaaagaccagcacttccgggcgcagcaatacgtcgataagacgcacttcgttttgcggatgaccggtacggattggcaccgcagcaaactcacggtcgctaacttcacgaatctgatcaaacgcggtttcccacgcccaggttttccacacgcagttaaccagtcgcccttccccatcaatcagttgcccggcagcatcccagcccagttcatccaatccacgcaagatacgcgtttcaaagcccgcctggtgcagcgcctgctccataaactgcgcgtgatagttttcctcgatatctttgtcctgcatgatatggacaaacggacgtgcacgactgtgtttccaggcaccagccaattcgttaatcagcccttccgccggattgaagccgttgcctttatagccctgctccgcccaacgttcgaggatcaagcccgcttcggtatgacaggaggcggagtcggcgttgtactcgtaaaccttcaggccacgctcatccatgcagaaatccatacgaccagtgatcatatggtgacggcgacgctgccaggagagacgcaaacgtggccagaggattttcgggatgtcgaacagcgccagcaggttgtcatctttcagcaccttgtcggttgcgtgaagatacatcaggtgcagctcgttggtggctttaattagctcctgctcggcactctcggtaatggtgtagtaatgataaggatcctgattgatcacctgaccgttggcctgcacataggcgttttgcagcggatctttttcatccagccatttaccgtcaaactggcctttgttttccaggcgcgctccgctgattttcagcagctcgcctgcaatttccggctgcggtaagctgtattcagtatcttccgtctggatcatccagcccagaatggtggtgtcatcaaaagtgtctttcagggtatagcagccgttttcgaccaccatctccagctcgcgcgtccactgttgcccttgcggcaacggggaatgaatcacgttctgttccgcaatacggactttgttgccatgcaattgggtaatgatggcgacatggccagtgtctttaaattcaccgcctttatcccagataagaagcgcacccgcgaccggcgcacgcgggctgccgttaggaaatgcctgcaatggcaggatgttgtcattaaccacttctcgcaggaagcgcaggctgaaaatctcccacgccatacccacgtcagtaaagaccacaccgtaattcagaaagagaaaacggcgagcaaattcaacgcattgccacttgtggcccatatattcgtcgtcgatatagctacggaatacggcgtcatcttcgtattcctgcggatcgagagaactgtaatcactagagtagattgctaccccacctggggcgtagcccaataatgtcccgaacggggcatcctggctggtcgttcctttgctcatcactttacctttaacaatacaacctaagcagttggcgtaattgttgtgctctgattacctgctcagcgacattaaccggacagaggtcagactaatcatacacctcatcgcagcggctggcgcaaagggttaaaaaattcacattctgtacagcaagtgacctgctacactgcttcaacactaccactcagaaggcaactcactatgacagacaatacttatcagcccgcgaaagtctggacgtgggataaatccgctggcggcgcgttcgccaatatcaatcgcccggtttctggtccgacgcatgaaaaaacgctgcccgttggcaaacacccattgcaactttatagcctgggaacgccgaacggtcagaaagtaacgattatgcttgaggagctgctggcgctgggcgttactggtgcagagtacgacgcctggctgattcgtattggcgatggcgatcaattctccagcggctttgtcgaagtgaacccaaacagcaagatcccggcgctgcgcgatcatacgcataatccgccgatccgcgtgtttgaatctggtagcatcctgctttatctggcggagaaatttggctacttcctgccgcaggatttggcaaagcgtactgaaacgatgaactggctgttctggttacagggcgcggcaccgttcctcggcggtggttttggtcacttttaccattacgcaccggtaaagattgagtacgccatcaaccgctttaccatggaagccaaacgtctgctcgacgtgctggataagcaactggcgcagcataagtttgttgcgggcgatgagtacaccattgcggatatggcgatttggccgtggtttggcaacgtggtgttaggtggtgtgtatgatgccgctgagtttcttgatgcgggcagttataagcatgtacaacgctgggcgaaagaagtaggcgaacgtccggcggtgaaacgtgggcgtattgttaaccgcaccaacggaccgctgaatgagcagttgcatgagcgccatgacgccagtgatttcgagacgaatacggaagataagcgtcaggggtaagggttggtgttcgtcgcagcaagccatccaggccggataaggcgttcacgccgcatccggcaatcgtgcacaatgcctgatgcgacgctgccgcgtcttatcaggcctacgaaagctaatcatcacgcgctggtaatgtcgtaatccatttggcgcagtgcgtctaatgtggctttggcttcatcttcgtcgatgatgctcatggcaaatccgacgtgtaccagcacccactggcccagtagatcggcagggttaccttcacaaatcagggcgatattcacatcgcgcttgataccacatacttcaacctgcgcaagctggtgaatatcttcaccgacagccagcacctggcctggaacgccaatacacattattaactccggttattcaacttcaatacttttgacgatcaggctatcgccggtatcgacacgcaaccgctcgccgtgacagagcggacactgcgcatcgtgctgatgaatctccaccacctggctgcaatcccagcaccaagcctgggcgggtttatagacgatatgtaaatcgcacccttgcgccaccgttccgtggcagacaatttcaaaactaaaacggacggcgctctcctcaacgcaggagagcgcgccaatttccagccacacggcggtgacgcgcttaacatcgtgctgctccgcctgccgttggataatttcaacggcgctctggcaaagagacaactcatgcattttcgccactcctgcgaccaaacagcagggcgcgacgccctgcgtgtggtacatccggattcgtgactggcaggctaaggatcattcgtgcgcagtcatccgtcaggcgttggccctcttcaatgctcatgctgtggctaagcgggctcatcaggctacaggagagatattggctaacaccgtccagttcgccaacggtaaaggtcatagtgccatacggcagttgcagaccaattttttcactcactttgcgcagcggccagagttgatccgggccggggaagataactgcactcagcatccacggggtgatcacacaccccgtccactgaccttcgaacagcgtaaaatcagaaacatacaccggcatactaggatgcagaaaagagagatcgtgcatgctacgccgggcaatttcttcaaacgctgcctgtacttgcgccttcggggaggtctggaaacctgctatctcttcagtcatgaatcgcctcccgtgggatggcttccacgccagattcacgcagcgcagccagaacctgctcaagcgcaggttcaatcattgcttcaaccgtcggcgttaagccgatgtgtggctccaggctttccgggatcacgccgaccagggtcagctttttcggaaactcgccggtgaagcgcagggcgctcaagacgtcggccaggccaagctgatgcggagagattttgttggtaaacaacgccggaacttcttcatcccgcaggatcatcatcgttcccggcgcgttctttttgctgacaatggcatccgcaataatcaaatgatcgcgatttgccatgtcgccaagcagctccattcccgccgtgccgccatcgaggatctcaacataatccggcagaatgtatcgttgctctaacgcttcgacaatccgcacaccgatggcttcatcggtcagcaaaatattgccgacccctaagactaaaatacgcattacagaaccttcacactaaccacttcgttgccgtcagcatccactacgtgtaccgcacaggccatgcacgggtcaaaggagtgaatggtacgcaccacttccagcggtttattcggatcggcaaccggtgtacccaccaggctctgctcgtaaggaccgacgtcatcattgaagttacgcggaccagagttccaggtacttggaacaaccgcctggtagttgctgatgataccgtctttaataaccatccagtgagagagcataccgcgcggcgcttcgaggaagccaacacctttgaattcacccgttgccggaatgttcggcttcacaaaggtggtgtgatcgcctttgccgatattggtgatcagtgcactgtattggttttgcaggatatcctgcaattcacagcagtgaacggtacgaccaataatacggcccagcgtggagtgcagctgtgccacttccagcgtgttgccagtcagtttctgataaatcgcaacgatttcattcagtttgttctgggtagattcgcgacctgccgccagtttcaccagcatattagccagtggccccacttctaccgttttgccgtagaaagtcggacttttcacccaggaatatttcccgtcgtcagaccaaccatcataagccggaatggtggtgccttcccacggtgcctgcggcgcttcgtctttataccaggagtgcttcgcgctttcctgaatgcctttgatcaggtattcatcggaatgagaagtgatcggacgatagctggacagatccgcattctcaatgtagccgcccgggaacaggaagctgccgtttttactgtcggtcgggaattccggcacgctcaggtagttcaccgcacctttaccgcgtgtcagccattccgggtagaacgcggcaataactgcggtatcaaccttataaacctgctcaacaaagtcgctcagtttgtcgatgaaagacttgatgtacatcaggcgctcaaggttcagcacgcccaaaccgtcgaggttgatcgggttcgcgacaccacctaccgccaggttctgaatgtgcggcgttttaccgcccagcagcgccacgacgcggttagcgtcacgctggcactccaacgcttgcaggtagtgcgctaccgcaatcaggttcacttccggcggcagtttcatcgccggatgaccccagtagccattagcgaaaatacccaactgaccgctggcaaccagatctttgatcttgttctgaactttggtgaactcttccggactgttcaggtgccaggtgctaacgcctttcagcatttcggaggctttggttgggtcagcttgcagtgcagaagtgatgtccacccagtccagcgcgctaagctgatagaaatgaacaatatggtcatgcgtggtgtgcgcagccagaatgatgttacggatgtattgcgcgttaaccggaacgtcgatattcagcgcactttctgccgcacgaacggaagacagcgcgtgagtggtagtacatacgccacagatacgttgcacaatcatccatgcatcgcgcggatcgcggtttttcacgatctcttccatgccgcgccacatggtaccggaagcccatgctttgctaacgacgccattttcgatttcgcaatcgatgcgtaaatgcccctcaatacgggttaccggatcaatagtaattctctggctcatgctttgctcgcctcatgacgattatgatcgttttgttttaaaggaggaagtatcggcagtagacgaatgagtacgatgtaagcgcaaatctcaatagccacaaaaccaatagaaatcaacagttcttcccaggtcgggaagtaggcgtaaccgccgcccgggttgaatgccaccaggctataggtcagacgccaggttgcacaacctaacagtgcgctcagtgcactcaggaacagcatgcgggaatcattacgcagcttcgccacacgcagaacgaccagcgggaagagcatcagcaggacttcaatccagaacatcacggagtagaagtcaccggcaaacgctaagctcagcttgtcgcgatagataagctcgccaaagcgcagcacgatgaaaatcgccagcaacacactgatggtgttggtcagcttaacaaacagactcttttcatccggaccgttgccacgcagacccgcctgcaccaggctaccttcaaagatgacaatgctgaagcccatgatgaacgccgtcagcaggctgaacagcggcaacatttcatagctctgccacaacggatgcaccttgtagcccgcgctgatcatcaggctccccatactagactggtgcatggtcggcagcagcgcaccgagcgcgatgatgaagaacatcaccttgtttagtcgctgtaggctcaccttccaccccagacgttcaaacagtgccggagcaaactccagtgccatcacgccgatatagatggtcatacagaccgccgtctcgaacagtacgctgttcacgttgaagtgacccggaatgtagaagtacggcaggttccagtagcgacccacgtcgatagtgatgctcaagccacccagactgtaaccaaacagactcgccaacagcgccggacgcaccagcggatggtattgcccacggttaaagacgtataccgcccacgccagcgcccagccgccacaggcaaagccggtgccaatcagcaggtcaaacgcgatccacacgccccacgggaagccgccgttcaggtcagagacagagcccagaccgaacaccagacgcttcacaatcaggagcatacagatgacgattaacggtccaaaaatcatgaccggtttactgatgattttgccgcccagcggttgtggatcatgactcatgatcgtctcctccgtcgtgattattcaactctcatgatcgtctcctccgtcgtgatggtcgtttttggtgttgcgacgaaccagcacggttaagcccgccagcacagccagtggtagcatcatgcctttatacagggtgtgttgaatattttcggaacgcgcaccggtagaaagatcgtccagtttcggcaggtcgagattttcataaggcacacccgtcagtaccagaacctgagtaccgccgccctctttctcgccgtacagatgcggataatatttcggcaccgtatgcaggtaagtgtcgccagatttcagcgtctgacgcggatagtggtattcgctgccaggcttcagcgccagacgttttttcgcctccgccatcagctcttcacgcgtaccgaaaatcaccgcgcccgccgggcacacttctacgcagccaggtagaccgcctttatcgagacgttccacacctttctggttgcacagctcgcacttatgcagcgcaccaaacgggttgttgtagtcgtacttcggcacgttgtacggacaggcgaccatgcagtaacggcagccggtgcacacatctttgtcgtaatggacaatgccggttttcggatcttttttcagtgcagagaccgggcacacagagacacagttcggatcgacgcagtgcatacactgtttcttaatgtacgcgtagccgttctcctcctggtctttgttgacccctgtgccgctggtccacacctgaatgatgttattggtatacgggctcagtttgtcgttgttgctccaggtctgttccccttgcgggttacgttcagggaaattgatatcctgacacttggtgacgcaagcctggcagcctacgcacaaggtgctgtcgtacaacatccccaggcttcccggaattggcgggcggttttcagcagccgcatgactgacagacggcagcgcgcccgtcagcaatgccccgcaggaggctgctttaataaaattacgtctgttcacggttattctccccgactgtcagcgttatctttcttttgctgacgacccagttcacgcaccgccatcacgctgacaccggcaaccaacccaaccacaccgccgagcaaaccaatagcgcctgcagagacgttgccgccctctttagcgttaacatccggtttctgactacgcggagtttgattttcgacgttggcaagctgatggatgcctttatggaagccgataccttcttcgttacagccatagcaagggtgaccaatcgccaccggccacacaccgccaacatcgcagaattgcagcgtactgcagttgccgtaagtttctggccctttacagccgaggtggtacaggcaccagccttcgcggtggccttcatcaccgaactctttggcaaaacgaccagcatcgaagtgcgggcgacgttcgcagtgttcgtgaatcagacggccataggcgaaggtcggacggtttttgtcatccagtttcggcggtttgccgtaagtgatgatgtgcgcaacggtcgcgaggaagttgtgcgggttcggcgggcagcccggaatattgataacggttttgcctggcagaacttcttgcaggctgactgcgccagttgggttaactccagctgcggcaacaccgccccacgcagagcaggaaccgatagcgataatggctgctgcgccttccgccgctttgcggatgtgatccacaatcggctcaccggcaaccatgcaataaataccgttatcttttaatgggatggaaccatccaccactaacacatactgccctttgtacttctcgagagcgttatgtttgttctcttcgacctgatgaccgaaggcggcggaaagcacttcgtgatactccagagagatagtctccagtacgaggttttctaccgttggatgcgttgcacgaagcagagattccgtacaaccggtgcactcctgcgcgccaatccagataactggcggacgctgcgggttagtaacgctttcggccatctctgcagcggctttgctacttaaccccatggtggcggctaatgctgcacaaagcttcatgaaatcacgacggttaatgccgtgagaatggatgagggtgttatctccagtcatttatagttattccgttgcgaagacctggcatatattttgcctcaatcgcaaaatcaataatgcgatcgatgcgccatttaccacacatttattatggttatcgatatcatgatactgcggcggggcgctaaaacgaagggaagaagcattagtgtaattaattaaagcaagataatacgtatgtttgatcaattttcgaggcgataaccggccataaaaaagcgcaacgtagaacaggaattattctcacgaaagaaatccattaccatctctttatccagtccatagcggcgcgtcagaatacccgcttcccaggcgctaagctggcgatctccggtcttttcgtacatccggtgactgtagcctaatacaaaaccgcgtttataatcggcacagaattttgtcacattaaccgcactgtcggcatgcgttgcttttaatcccgccattaagcctttaccaaaatggttattcatcgttcacctcattcgctatatattgtcatatatagcgatattttaggcaaagaacgacttttgcgcacgctattttttcatgcttgtttaagacgtaatcccgtaagagataaacctatcaggagagatatttatcgaaccatttcagtgtcctttgccaggcaagatcggcggcagatttgtcataacggggcgtggaatcattatggaatccgtgattaacccccggatagatatacgcctcataaaccttattattggctttcaacgccgcctcgtaagcaggccagccctcgttgattcgggtgtccagttccgcgaagtggagtagtaaaggcgcttcaatcttcgccacatcggcagtgggtgcctgacgaccataaaacggcaccgcgcaggccagttccggatacgcgacagccgccgcgttgcttacgccaccgccatagcaaaatccggtaatacccactttgcctgtcgcttgcggatagcgttgcataaactcaattgcggcaaagaaatcattcatcagtttgttggatcaacctgctgttgcagctcacgacctttatcatcatttcccggataacctccaacggaacttaagccgtcaggtgccagggcgatataccccgccttcgccactcgccgtgccacatcttcgatatacggattcagtccacgattctcatgcaccaccactacggctggcgttttgccgctcatctttgcgggcttcaccagataaccccgcacctcgccgtgaccatttgggctaggatacgtgatgtactcagcaacaatttccgggtcggtaaactctacctgagtcgccagcgcataatttggcttgagcaaatcaaacaacgctaatgccgtcatcccgcctaccgcacttcgccgcaaggttgaggaactcacgtttcgagattttcccgtgagcgtaatagtcatagtaatccagcaactcttgtgggaaatctttggcggttaaacgcggcatcgttgcactcctcagttggtgtttttttaagcaaagcataagcacgtatttttgcccagtttttcgtcactctgtgagccagactacgggatacgcgctggcgaatcgctaaactagaaacattgtttcgaaattgaacggtggaaaggagaggtcatggtctggttagcgaatcccgaacgttacgggcagatgcaataccgctattgcggaaaaagtggtttacgcctgcccgcgttaagcctcggtttatggcacaatttcggtcacgttaacgcgctggaaagtcagcgtgcgatcctgcgtaaagcgtttgatttgggcattacgcactttgatttagccaacaattacgggccgcctccaggaagcgcagaagagaactttggtcgcctgctgcgggaggattttgccgcttatcgcgatgaactgattatctctaccaaggctggctacgatatgtggcccggcccttacggctctggcggtagtcgtaaatacctgctcgccagcctcgaccaaagcctgaagcgtatggggcttgagtatgtcgatatcttttactctcatcgcgtcgatgaaaatacgccgatggaagaaaccgcctctgcgctggctcatgcggtacaaagcggtaaggcgctgtatgtcgggatctcctcttacagcccagagcggacgcaaaaaatggtcgagttgctgcgcgagtggaaaattccgctgttaattcatcaacctagctacaatttactgaaccgctgggtggataaaagcggcctgctggataccctgcaaaataacggcgtgggctgtattgcctttactcctctggctcagggattgctgaccggaaaatatctcaacggcattccgcaagatagtcggatgcatcgtgaagggaataaagttcgtggtctgacaccgaaaatgcttaccgaagccaacctcaacagcctgcgcttattgaatgaaatggcacagcagcgtggacaaagtatggcgcaaatggcgttaagctggttgctgaaagatgatcgcgtgacgagcgtattgattggtgccagccgcgcggagcaactagaggagaacgtgcaggcgctgaataatctgacatttagcaccaaggagctggcgcagattgatcagcatatcgccgatggcgagctgaatctgtggcaggcgtcttccgataaatgacctgttaataacgggcgcgcgaaccgcgcccgaatcagatcagtgattatgacgagtcagtcggtcaagatagcccatcacaaatgcagaaagcacaaacgtcagatggataatgacgtaccacatcagtttgttatccgggacatttttcgcatccataaagacgcgcagtaagtgaatggaagaaattgccacaatgctcgctgctactttgtttttcaggctcgttgcgtccattttccccagccagttcagcttctctttgttctcggagatatccagctgactgacgaaattctcataaccggaaaacatcaccatcaccagcaaaccgccaaccagcgtcatatccaccaggctcagcaacacgaggatcaaatcactttccgccatgctgaagatattcggcagtacgtgaataatctcctggaagaacttcagcgccagggcaactaacgccaggctaaggccaaagtacacgggggcaagcagccagcgagaagcatacattgcattttcaagaaaacgttccatacattcctgtcgtgtagttaaaacgggcaacagtatatcgcaattgagtaaacagcacgcaacagcaaatcaacatatacgttaaacctttgtcgcataattctgaggtttagggatcttcctggttcccttatcaacgcatcgagaacgtctacccttaaaggacgttgaacctgaagggagaaaaacgatgtctcatttaaaagacccgaccacgcagtattacactggtgaatatcccaaacagaaacaaccgacgccaggcatccaggcgaagatgacaccggtaccggattgcggcgagaaaacctatgttggtagcggtcgcctgaaagatcgtaaagcactggtgacagggggcgattccggaataggtcgcgctgccgccatcgcttacgcgcgtgaaggggctgacgtggcgatcagttatcttcccgtggaagaagaagacgctcaggatgtgaaaaagatcattgaagaatgcggacgcaaagccgttctgctgccaggcgatttaagcgatgagaaatttgcccgtagcctggttcacgaagcgcacaaggcgttaggcgggctggatattatggcgctggtcgccgggaaacaggttgccattccggatattgcagacctcaccagcgaacagtttcaaaagacctttgccattaacgttttcgcgctgttctggctaacccaggaagcgatccccctgctaccgaaaggtgcaagtatcatcaccactagcagtatccaggcataccagccaagtccgcatttactggactatgcggctacgaaggcggcgattctgaactacagccgtggcttggcaaaacaggtcgcggagaaaggtattcgggtgaatattgtcgcgccaggcccgatctggacagcactgcaaatttccggcggacaaacgcaggataagatcccgcagtttggtcagcaaacgccgatgaaacgtgcggggcaaccggcggaactggcccctgtatatgtttatctggcaagtcaggagagcagctacgtcaccgcagaagtgcacggcgtgtgcggcggcgagcatttaggttaaaaaaatgcccggttgtgaaaagcaaccgggcatcattgtgaattcactcttacctgatgtggcgaaaacgccttatccgcctacaaacgcatgaagattcaacatgttgcaatagattttgtaggcctgataagcgtagcgcatcaggcattgagcacctaatgccggatgcgtcgtgaacgccttatccggcctacaaacgcacgaagattcaacatgttgcaatagattttgtaggcctgatgagcgtagcgcatcaggcaattctactttacttcgctttggcggtttcttcgccgaccagacctatcttcaggtaacccgcctgatgcagcgtatccattaccttcatcaacgtctcgtaatcgacggttttgtccgctcggaagaagatggtggtgtctttcttgccttcggttaacgcattcaacgccgtaatcattgtttcatcggtgaccggatcgttaccgataaacatgctgttgtctgccttcacgctcagataaaccggtttttccgggcgcggctgcggcgtgctggtagaagcaggcaagttcaccttcacatctaccgtcgctaacggtgccgccaccataaagataatcagcagaaccaacatcacgtcgataaacggcgtcacgttgatatcatgcatttcgccgttatcgtcgaggttttcgttaagatgcattgccatcggatattatcctgcgcgtaatttttgtgcgacacgaaccggatgcgcagcggcgctggcttccagatccaggtcacggctttgcagcaacaatacctgcgctgcaacatcacccagcatcgctttaaagccgccaatctggcgtgcaaatacgttatagataacgaccgcaggaatcgctgccacgaggccgattgccgttgctaacagagcttctgcgatacccggcgcaacgactgccaggttagtggtctgcgtttgcgcgataccaataaagctgttcatgatgccccagaccgtaccaaacagaccaacgaacggagaaatcgcgccgatggttgccagatagccgttaccgcggcccatttgacgacccactgcggcgacccgacgctccagacggaagctggtacgttctttaataccttcgttatcgtcgctgccttcactcagttccagctcattctgcgcttcattgagcaaatgcaggcttaagcttttgctaccaaaatcagcggcgatatcgttggcctggtttaaggaacgcgcttcagccagcagttgctgctcgcgcttaaggcgacgcttctgattgaagaactctacgctcttactgaagaagattgcccaggtgactacggaggccaaaataagcccaatcatcacgcacttaacgacaatatcggcgtgctgatacataccccagacggaaaggtccgtctgcattaaattattacccactgtgtatctccaggacgcaagtcacaaaatctgcgcataataatatcaaaacgacgtcgaattgatagtcgttctcattactatttgcatactgccgtacctttgctttcttttccttgcgtttacgcagtaaaaaagtcaccagcacgccatttgcgaaaattttctgctttatgccaattcttcaggatgcgcccgcgaatattcatgctagtttagacatccagacgtataaaaacaggaatcccgacatggcggacaaaaagcttgatactcaactggtgaatgcaggacgcagcaaaaaatacactctcggcgcggtaaatagcgtgattcagcgcgcttctagcctggtctttgacagtgtagaagccaaaaaacacgcgacacgtaatcgcgccaatggagagttgttctatggacggcgcggaacgttaacccatttctccttacaacaagcgatgtgtgaactggaaggtggcgcaggctgcgtgctatttccctgcggggcggcagcggttgctaattccattcttgcttttatcgaacagggcgatcatgtgttgatgaccaacaccgcctatgaaccgagtcaggatttctgtagcaaaatcctcagcaaactgggcgtaacgacaagttggtttgatccgctgattggtgccgatatcgttaagcatctgcagccaaacactaaaatcgtgtttctggaaagcccaggctccatcaccatggaagtccacgacgttccggcgattgttgccgccgtacgcagtgtggtgccggatgccatcattatgatcgacaacacctgggcagccggtgtgctgtttaaggcgctggattttggcatcgatgtttctattcaagccgccaccaaatatctggttgggcatagtgatgcgatgattggcactgccgtgtgcaatgcccgttgctgggagcagctacgggaaaatgcctatctgatgggccagatggtcgatgccgataccgcctatataaccagccgtggcctgcgcacattaggtgtgcgtttgcgtcaacatcatgaaagcagtctgaaagtggctgaatggctggcagaacatccgcaagttgcgcgagttaaccaccctgctctgcctggcagtaaaggtcacgaattctggaaacgagactttacaggcagcagcgggctattttcctttgtgcttaagaaaaaactcaataatgaagagctggcgaactatctggataacttcagtttattcagcatggcctacagctggggcgggtatgaaagcttgatcctggcaaatcaaccagaacatatcgccgccattcgcccacaaggcgagatcgattttagcgggaccttgattcgcctgcatattggtctggaagatgtcgacgatctgattgccgatctggacgccggttttgcgcgaattgtataacattgccacttttggacaattttgcagacattttattgtgaaaagtcttaaattgttgcgtccgggatcaaggcgtcccggacgattcaggagtacaataggcagataaaggcttaaacgctgttccacaggaaagtccatggctgttattcaagatatcatcgctgcgctctggcaacacgactttgccgcgctggcggatcctcatattgttagcgttgtttactttgtcatgtttgccacgctgtttttagaaaacggcctgctgcccgccagttttttgccaggcgacagcttgttgatactggcaggcgcattgattgcccagggggttatggattttctgcctacgattgcgattctgaccgccgcagcaagtctgggctgctggctaagttatattcaggggcgctggttagggaataccaaaacggtgaaaggctggctggcacagcttcctgctaaatatcaccagcgcgccacctgcatgtttgaccgccacggtctgctggcgctgctggctggacgttttcttgcatttgtccgtacgctgctgccaaccatggcgggaatttccggtctgccaaaccgccgcttccagtttttcaactggttaagtggattgctgtgggtcagcgtggtaaccagttttggctatgccttaagtatgattccgttcgttaaacgccatgaagatcaggtaatgacgttcctgatgatcctgccaattgccttgttaaccgctggcttgttaggcacgctgtttgtggtgattaaaaaaaaatactgtaacgcctgacgattttccccgttcccggttgctgtaccgggaacgtatttaattcccctgcatcgcccgcattcttgccgcatcttcccccggcgtcacaccgaagtaacgtttaaactcacggctaaattggcttgcgctttcatagccgacgcgcatcgctgctgcgctggccttcatgccgtcatggatgatcatcatccgcgccttatgcagacggtaattcttcaaatactgcaacgggctggtactggtgacagacttaaaattatggtggaacgcgcttacgctcatgttggcttctgccgccagttgctcgacgctcaggttttcggtgtatttattctcaatccgtttcagcacgcggctaatcagactgaagtgagtctggcgactgaccagcgccagtaacgcgccgccgcaaggtccggtcagcacgtagtacagaatttcgcggatgatctgtttgccgagaatacgcgcatccagtggtcgctccatcacgtcgagtaaccgctccgccgcgcataaaatctcttcacttaacgtggcggagttaatcccgctggctgccatgctcggctggaaatgctcatcttcgccaatgtccatcaacagttcctgtaactgcaaaatatcgacattgagacgcaaccctgccagcggcacctcactcgtggcataggtttcgcactcaaacggcaacggcaccgtcagcagcaggtattcattggcatcataacgaaacacgcgttcattgatataaccgattttatgcccggaaaagagaattatgatgccaggctcgtacatcaccggtgtacgtgcgaaaggcgtctcgccatacaacaaacgcacatcgggcaacagtccactcaaactattttctttatttttcagtttattaactttatccgccagcaagcggcaaatctcttcacgtttcatatcgcgtaatttcttaggaataatgcggcaattactttgtgcgcaattttgtagcatttctccagcactctggagaaataggcaagacattggcagaaatgagcattgagagccagggcgctggcgatcacaatgaaaaacatcaggcagatcgttctctgccctcatattggcccagcaaagggagcaagtaatgaacaactttaatctgcacaccccaacccgcattctgtttggtaaaggcgcaatcgctggtttacgcgaacaaattcctcacgatgctcgcgtattgattacctacggcggcggcagcgtgaaaaaaaccggcgttctcgatcaagttctggatgccctgaaaggcatggacgtgctggaatttggcggtattgagccaaacccggcttatgaaacgctgatgaacgccgtgaaactggttcgcgaacagaaagtgactttcctgctggcggttggcggcggttctgtactggacggcaccaaatttatcgccgcagcggctaactatccggaaaatatcgatccgtggcacattctgcaaacgggcggtaaagagattaaaagcgccatcccgatgggctgtgtgctgacgctgccagcaaccggtagtgaatccaacgcaggcgcggtgatctcccgtaaaaccacaggcgacaagcaggcgttccattctgcccatgttcagccggtatttgccgtgctcgatccggtttatacctacaccctgccgccgcgtcaggtggctaacggcgtagtggacgcctttgtacacaccgtggaacagtatgttaccaaaccggttgatgccaaaattcaggaccgtttcgcagaaggcattttgctgacgctaatcgaagatggtccgaaagccctgaaagagccagaaaactacgatgtgcgcgccaacgtcatgtgggcggcgactcaggcgctgaacggtttgattggcgctggcgtaccgcaggactgggcaacgcatatgctgggccacgaactgactgcgatgcacggtctggatcacgcgcaaacactggctatcgtcctgcctgcactgtggaatgaaaaacgcgataccaagcgcgctaagctgctgcaatatgctgaacgcgtctggaacatcactgaaggttccgatgatgagcgtattgacgccgcgattgccgcaacccgcaatttctttgagcaattaggcgtgccgacccacctctccgactacggtctggacggcagctccatcccggctttgctgaaaaaactggaagagcacggcatgacccaactgggcgaaaatcatgacattacgttggatgtcagccgccgtatatacgaagccgcccgctaagctttttacgcctcaaactttcgttttcgggcatttcgtccagacttaagttcacaacacctcaccggagcctgctccggtgagttcatataaaggaggaacgtatggctaatccaaccgttattaagctacaggatggcaatgtcatgccccagctgggactgggcgtctggcaagcaagtaatgaggaagtaatcaccgccattcaaaaagcgttagaagtgggttatcgcagcattgataccgccgcggcctacaagaacgaagaaggtgtcggcaaagccctgaaaaatgccagtgtcaacagagaagaactgttcatcaccactaagctgtggaacgacgaccacaagcgcccccgcgaagccctgctcgacagcctgaaaaaactccagcttgattatatcgacctctacttaatgcactggcccgttcccgctatcgaccattatgtcgaagcatggaaaggcatgatcgaattgcaaaaagagggattaatcaaaagcatcggcgtgtgcaacttccagatccatcacctgcaacgcctgattgatgaaactggcgtgacgcctgtgataaaccagatcgaacttcatccgctgatgcaacaacgccagctacacgcctggaacgcgacacacaaaatccagaccgaatcctggagcccattagcgcaaggagggaaaggcgttttcgatcagaaagtcattcgcgatctggcagataaatacggcaaaaccccggcgcagattgttatccgctggcatctggatagcggcctggtggtgatcccgaaaagcgtcacacctagtcgtattgccgaaaactttgatgtctgggatttccgtctcgacaaagacgaactcggcgaaattgcaaaactcgatcagggcaagcgtctcggtcccgatcctgaccagttcggcggctaacatgcaaattctcccggtggcggtaatgttccgctaccggacttttcagaaatcatttattcccctcgcgtcccgcccgttgttactcttccttgttcaggaatgccaaatataaggacatcatcatgcagagccggaagctcttaaaagaacaactcatctatatccgggataaacgcaacggagaggtgaaaaacagatgaaaataatacttctgtttttagcagccctggcaagttttaccgtacacgcacagccccccagtcagaccgtagaacaaacagtccggcatatttatcagaactataaaagtgatgccactgccccttattttggtgaaaccggagagcgggcgataacttctgcgcgtattcaacaggcgcttaccctgaacgacaatcttacgctgccgggcaatattggctggctggattatgatccggtttgtgattgtcaggattttggcgatctggtgctagaaagcgttgcgataacccaaactgacgccgatcatgccgatgccgttgtgcgctttcgtatctttaaagatgataaagaaaagaccacgcagacactgaaaatggtggcggaaaatggtcgttgggtcattgacgatattgtcagcaatcatggcagcgtcttacaagcagttaatagcgagaatgaaaaaacgctggccgctttagctagcttgcaaaaagaacagccggaagcctttgttgccgaactctttgaacatattgctgattatagctggccgtggacgtgggtggtttccgactcttaccgccaggcggttaatgccttctataaaaccaccttcaagacggccaataatcccgatgaagatatgcaaatagaacggcaatttatttacgacaatccgatctgttttggcgaagagagcctatttagtcgcgttgatgaaattcgagtcctggagaaaaccgccgattccgcccgcattcatgttcgttttacgctgaccaatggcaacaacgaagagcaagaactggttttacagcggcgcgaaggcaagtgggaaatcgctgattttatccgcccgaacagcggcagcctacttaagcagattgaggcaaaaactgccgccagattaaagcaatgagctgaattaaataacaattagccggaacaataaataaaagggaacactatatgaaaacgattttcaccgtgggagctgttgttctggcaacctgcttgctcagtggctgcgtcaatgagcaaaaggtcaatcagctggcgagcaatgtgcaaacattaaatgccaaaatcgcccggcttgagcaggatatgaaagcactacgcccacaaatctatgctgccaaatccgaagctaacagagccaatacgcgtcttgatgctcaggactattttgattgcctgcgctgcttgcgtatgtacgcagaatgataaaaaaatccccggtagcgtgtcagttgccggggatattttttaacgtccaaccgccgctttaggccgtttcttcgcaccagcattcaccggacgagattgcgtagagctcgctttttttgccgtagcaggcgtctgacgctgggtcgccatcggcgtatgtttcgtcaacgccggacgggtattgcggttctggcgacgagcttcacgcatctcttcaatggttggcgcaggcactaagcaatcgcgacggctgccaatcagatgctttttgcccatcgcttccagcgcctggcggattaacggccagtttgccggatcgtggtaacgcaacaacgctttatgcaaacgacgctgtttgtcgcccttcggtacgaagacgtcttcgctcttataaccaatcttcgccagcgggtttttcccggtgtaatacatggtggtactgttcgccagcgggctcggatagaagttctgcacctggtcgaggcggaagcggtgctttttcagccacagcgccagattcaccatatcttcatcacgcgtaccggggtgcgcggagatgaaataggggatcagatactgctctttacctgcctgtttactgtaagtatcgaacagctctttaaagcggtcatagctgcccatgcccggcttcatcatcttgcttaacggcccttcttcggtatgttccggggcaatcttcagataaccgccgacgtgatgggtcgccagttctttgatatagcgcggatcttctacggctatgtcataacgcacaccagaggcaatcaggatctttttaatgcctttcagatcacgcgcacggcgatagaggttgatcgttggttcgtggttcgtgtccatgtgcggacaaatatccggataaacgcagctcaaacggcgacaagtttgttcagcgcgtgggcttttgcagcgcaacatatacatgttggcagttggcccaccaagatcggaaatcacgcccgtaaaacctggaacggtgtcgcggatcgcttcgatctcattaatgatgctatcttcggaacggctctgaataatgcgcccttcgtgctcggtgatagaacagaaagagcagccgccaaagcagccacgcataatgttgacgctaaaacggatcatttcgtaagccggaatacgggcattgccataggccggatgtggcacgcgcttgtatggcagcgcaaaaacgctgtccatctcttcggtagaaagcggaatagcaggcgggttgatccacacatagcggtcgccgtgtttttgcatcaatgcgcgggcacagcctgggttggtttcgtggtgcagaatacggctagcatgggcgtacagcactttatcgcccttcactttctcgaaagaaggcagcaacacgtaggttttttcccacggtttcgggcgcggtggctgcacggttacggctttggcttcctgctttttcggtgccaccggtttgttatccgcgcacggcaaatcttcaccatacggatgcgggattgggtcgatttttccaggggtatcaagacgggtggaatccacgccgctccagccaggcagcgcctctttcacgataatcgcggtattacgcacatcgcggatttcactaattggctcgcccatcgccagacgatgcgccacttccaccagcggacgctcaccgttaccaaacatcagcatgtcggctttgctatccaccagcacggaacggcgcacggtatcggaccagtaatcataatgcgcggtacggcgcagactagcctcaataccgccgaggatcaccggtacatctttccacgcctctttacaacgctgggtataaaccagtgtggcgcgatccgggcgcttacccgcgacgttatccggcgtgtaggcatcgtcatgacgtaaacggcgatcggcggtataacggttgatcatgctatccatgttgccagcagtaacaccgaaaaacagattcggtttacccagacgcataaagtcgtctttgctgctccagtccggctgggcgatgatcccgacgcgaaagccctgcgcttccagcatacgaccgcaaatcgccatcccgaagcttgggtgatcgacatacgcgtcgccagtaaccaaaatgatgtcgcagctatcccagccaagttgatccatctcttcacgagacatcggcaaaaacggtgccggtccaaaacaggcggcccagtactgcggccaggagaacaggtcgcgatccggttggatcagggagatagagctcattttgcttccagaaatgataaaaaaataatcaaaggccggggattataagccggaacgaaagagaaatcgaaaggtattccatactcgccctcctcgggcgagtatgaagattacggtaccggattgaccaacagttgcccaatgctgccacggtccgccatttccagcgtctgactgttgaagtagaacgggaagtgcgcccaggaaggctgaccgaaataaacaagcagctccacttgtccgtcaacccaaacggtatctttccagcctctgtcttccgggaacggcatcgcgccattcacgttacggatctggaacattacgccttcaatatggaacgcttgcggctcgtccgcgcgtaccgtccagcgttcccacgttccttgctgcgcggtgacatcaatacggttgacgtcccacagctgtccattaatacccgggtcatcacccagactgatatcgcgactgcgaattgggctaccagccatgatttcagttggcagcaagcgcatcggaagactgtctgtgaccagcggcagaaggccggttgggcgcagcgttagcaccagggtagaaaccagaatactggatggctcaaagaagccacgaatacgatcaacaatgctcgccgcttcgccacaggtgatgctcacttcatcgccgttgctcatatccaccagaatctcgcggcgctcgcccggtgccaggctaagttgcttcacgcttacaggagcaggcaggaatccctgatcgccagaaatcacatgtaacgggcgaccatcgttcatctgtagttgatagcgacgagagttgctcgcgttcagcagtcgcaagcgcacccagccacggctgacttcaacgtacgggctttgtacaccgttaaccagcagcgtatcaccaacaaagccgccgcttcccggttcgttgtattctggcgtaccaaagttatccagccgtttatcctggataatgaccggaaaatcatccacaccataatggttggggataggcaggctcttgctgacttcatcttccaccagccacattccggcaaggccgttatagacctgctgagccgtgcggttgggagtattggcgtgataccacagagtagctgcgttctggcgaatgggcagtacgggtgcccagtcagcgtttgggctcatcatccgtgccggaccgcccatcagcgggcctggtacctgtagcccggccaccgtcatactgacattttctgtcaggcggttgctgtaaataagcttaacatcgtcgcccttccagacgcggatagtcggccccaggtaacgaccattgattccccagacgctcgcgcgtgtccctggcgtaaaactccagtgcgcacgttgtacagtcataaacagcggttgcccacggcgagattcaagtagcggcggaacgggtagcggttgctgttgcccggctgcgctggccttcaggggaacagcgcctgcacaaagtgcaatcccgcttgcctgaatgaactgacgccgactgagactcatatttgctccatgtaaaactggctaaagtaataccgtgcaggaaagtgttccccgcaaaaatacagattgccgacttaaacttttccggcggcttcgcgttctgcgacttctttatcgagctcggcgattttttgttccattatgctacgacaatgggcagccagctcacgaacctgatctttgccatactgactgacgtcaattggcggcagcatttcgacaatcaccagaccgttgtgcagtcgattaagattaatcttattgctagttgtagagacgcacacgggaataatcgggacgcccgccgcaattgccgcgtgaaatgctccagtcttgaacggtagcaggccgcgaccacggctgcgggttccttccgggaacatccagatggaaatacggcgttttttgaagtgattcactacttccgcaatggtgccgtgagctttagtgcgattgtttctgtcgatcaataagttgccggttaaccagtacaactgcccgaagaaggggatccacagcaagctctttttacctaccgtcaccgtcggcggttgcacgatgttgcttgctgtcaccatgtcatagttgttctggtggttagcgatatagatagcattgccgtagctttcagcgtctgtaggtttacggcactcaactttcaggccaaacagcggcgcaagacggccaaacatatgcccaaaggtggccacatgtttcgggttacgcgggctgaaaaggcagtaaatggagccgaatacacagactaagatgctgtaaatcacggtaataataagacgaaagatatatagcataacaccctctgaaggtctgagagactggcattgtacgtcacctgaaatcaggttagggcattgttaaaagccgctctctggaaaagcgtattgttaatcgcaacgcatgaataaacaacggtttcaagggaatttttatcgtttccgggggttgaatacgctgccggatgacgacttaacgtttcatccggcgttccttgcaagcgggaggaaacagcgccctccccggcatattactcttcgctatcaccgctgctggcacggcgaggagagtcgatctcaacacgatcgatacgctgcaaaccgcgcatcaacgtaccgcggcgtccacgttcgccagtgactttctgtaactcttccgggcgcagtttaattttgcgtttcccaacatgaatggtcagcgtgctttgcggcggcagaacgtacaattgcgccagaccatcttctccacgcgcggcttctgcgcttggaatgttgataatcttgttgcctttgcccttgctcagctgcggcagatcacttaccgggaacatcaacatacggcctgcctgagtgattgccagcagcatatcggaagcatcttcaatcaccaccggcggcataacatgggcattttccggtaaggtgatcaaagccttacctgcacggttacgcgccaccagatcgttaaaggtgcagacgaaaccgtaacccgcatcggaagccatcagcagtttctgatcgtcgctttccatcagcatatggtcaacggtcgccccaggcggcaacgttaatttgccggtgagcggctcgccctgaccacgcgcgctcggcagcgtaatcgggtcaatggcatagctacgaccggtggaatcaacaaacactaccggttggttgctcttacctttcaccgccgctttgaagctatcacccgctttataattcaggcccggcgcgtcgatatcatggcctttagcgctgcgtacccagcccatctggctcagcacaatggtgacaggttcagacggcagcatgtcgtgctcgctcatcgctttcgcttcttcgcgttcctgcaacgggctacgacgatcgtcaccgtaggcttgcgcgtctgcctgcagttctttcttcagcaggttattcattttacgctcggaagccaaaatgccctgcaactggtcgcgctctttttccagttcactctgctcaccgcgaatcttcatctcttccagtttggcaagatgacgcagtttcagttcgaggatcgcttccgcctgggtttccgtaaggccaaaccggctcatcagcgccggtttcggttcatcttcattacgaatgatctcaatcacttcgtcgatattgagaaacgccaccagcaaaccttcgaggatatgcaggcgcttgaggactttctccagacgatagttcagtcggcggcgcacggtatcgcggcggaacaccagccattcggagaggatttccagcaggtttttcaccgccggacgaccatccagaccgatcatattaaggttaatacgatagctcttttccagatcggtggtagcgaagaggtggttcatcacctgatccatatccacgcggttggaacgcggcacaatcaccaggcgggtcgggttctcgtggtcagattcatcgcgcagatcgtcaaccatcggcagctttttgttgcgcatttgcgcagcaatttgctccagtacgcgcgcaccactaacctgatgcggcaatgcgctgataaccaccgcgccatcttctttcttccacaccgcgcgcatacgcacactaccacgtccgttctcgtagattttacggatctcggcgcggctagtgataatttccgcttcagtcggataatccggcccctgcacgatatccagcagctgatcgagcgtggttttcggctggtcgattaatgcgattgccgcctgagccacttcacgcaggttatgcggtggaatatcggtcgccatgccgacggcaataccggtggtgccgttaagcaaaatgtttggcagacgggcaggtagcattttcggctcctgcaaagtgccgtcgaagtttggcacccagtcagccgtcccctgccccagctcgctcaatagcagctcggaatatttgctcaaccgggattcggtgtaacgcattgccgcgaagcttttcggatcgtccggcgcgccccagttcccctgaccatcaaccagcggataacggtaagagaacggttgcgccatcaggaccatcgcttcataacaggcgctatcgccgtgcggatggtatttacccagtacgtcaccgacggtacgggcgctttttttaaatttggcgctggcattcaggcccagttcagacatcgcatacacaatgcggcgctgaacaggtttcagaccatcaccaataaacggcaacgcacggtccatgatcacgtacatggagtagtttaagtaggcgttttccgtaaattcatgtagcgcaaggcgctctgccatatcgctcattaattctgattcctcaacttattcgccagccttcaaaggggcaatattgccggagatactacattatctgccgcgtcgagtcacaggagatcaacgtgaatagcgccgccggacgtgctccgacggcgataaaggcatcaatgtgccttgatatacaactctttgctgtagacataatcctggggattatgcagcggaaaaccgccaacgtagggtttaagcagtttgattaacggctgatagtagataggaatcagcggtgcctgttggttgatgatcacttctgcctgctgatacaacgcattacgctttgtcgcatcagtgatctgcgtggcctggtttagtaaggcgtcatactgcgcatttttccagtgaccgacgttttcttcactatcgcttttgagcgtgttcaggaagctggaagcatcattgtacgtcgcatcccagctctgccgagacagcatgaaatcaccggctcgtcgggcatcaagataggttttccactccattgtgcgcagcgtcacctgtgcacccagccattttttccattcggaagacaacgctatcgcggtcttttcatgcagatcgtacttgttgtagaacagctcaaagcgtagcggatgagaggcgtcgtatcccgcctgtttcagcaaggcttttgccatcgcgacgcgctcactcattggcttttgcagttcatcgaacgtcgtcgcgctaaagccttttacctctggcggcgtcagcgtggttgcgggcgttctcaaccccagtaccttttgcgcaataagctgtcgatcaaccgtaagatatagcgcccgacgcactcgcacatcgttaaatggcggtttctcaaggttgaagttgtaatattcgctgttcagacgcggaataattcgtagctcgccaggcagacttttttcaatggcgggaatttgctgcgccggaacccaggtgagatcgacctctcccgcgcgatagcggttatagccggtgacgctattatctagcgccagatactcaacctgttgcaatactgtatgttgcgcatcgcggtactttggatttttgcgtgcagtaatcttttcgttaactacccactgatcaagcacaaaggcaccgttgtaaaccatgttctctggcttactccagctatcgccatgtttagcgatgacatgatgaggaaccgggaacagcgtcggccaggcgagcatcgtcgtgaaccaaggaaccggctgctcaagcgtaacttcaagagtacgatcatccgtcgctttgacacccaggcttgtaacatctgctttacccgcaacaatagctgcggcattgttaatgtgcgcctgtgccagatagccagcaaaagggcttgccgttttcgggtcaaccgcgcgctgccagccgaggacaaaatcctctgccgtcagaggctgaccgtcggaccactgcaaaccgctacgcagatggaaaatatagcgcttgccgccgtccagtatctcccagcgttcagcctgagcgggctgcacctggccttcaccgtccatccataccagaccttcaaacagatccagcacaatctgcgcggcagtattctcctccaccttttgcgggtcgagcgtacctgggtcgctatgattgttgtaacgaaagacttgttgcggggcgagcggtgtgttggcgggaacgtcagcagcgtagagaggagccgcacttaccaggctgaccagccataataaatttcgcgtatacatggtattccttaccggagaaattataagcccaacaacaatacgcctgtggcattgttcgctcaaacttatcgcgagtgatttggctcacactccggtaaagaaaaaagcgagttgcccccgcttttccattaattaacggatttcattcaatagttctggatgcttatccagaacacgtaaaagtttgattgtggaaggatgaggttgggcattgcctttttcgtaacggctaaacgcatttacacctcccccaaaaatttcgcttgcctctttttgggtaagagagagcttttttcgaaccttcactataaattcaggtgccactgtttcggcattcacgctagcccgaaatgcctttacttgcgccatgaaagcatcactctcttctttattcatgatgctctcttcgcaatggacacaatataaaccgtggatacctttcaatactgtttttcgtccacggaaggtgtatggaatatctttaatgccagaaaccatttctccctggtggcaaaccggacatttcatattacttctccttaaagctgacgatcagtacgtcatgaattaccgtaattttaagataaacctggcctgtaacaagcctgggtctgtaaacatcctgccagatagtatgatcagagtaggtggtcatgcttttataaaagtcgctctcacttaatccaatgataacattacacataccatcaaaatccaaacctaactcatctgcatttaacagggcactacgtgttgtacgaacttgcccggcattgacaagttttttaacctgactcaaacgtgtatgtggtgtgcgtttttccataacccccgcctccctgttactttagttataacctaaaaggttaattacagcaatgaaaaagcacctaaaaggttagttagatgtacggagatagtgaccacacaaaacgtattctttaaggaaagtgattgaccatataagaaagtggcgcattagtagcgccagtttgaagcaggaatttataagggaagctggagtcaggcatcacgccaacggcacataaacatccgtttccagtcgctgctctgtcaccccttcggcaagattggtgtagtgaaacagaatcggtgctttacgcattttctcgccgcttgcaggcagccagtggcgaatgatgccccataccgtgtgactaatatcgtccagctcgccaacgtggcgggccacggcataacgtccaccggtaagttcaccattgctcacaccataacgattatcgggaatcggttcgctaacgctgccgcagatatcaaagcgaaacgcttccggtgcggtggtggcagggtcgtcccaggcgacgccaaaagtctggctttggttaacaggagaaagccccgtctctttacgccacatgataaatttcgccacgctgtagttgagcaattcagggctacagcggtgcggcaacatcgccacaggtatacttgggaaatcgataatgtttacatccagtgtcaggtttgtcattttgcctccctgcgaaattattcccgggaacgcgtcccgggagcggtaacaattacggatttactttgcggatctgtttgacgtcaatttcaacagaattccagtctttatcgacttcaccctgaatctcaaccgtatctttcggcgtcaccgtcacgccgttccagcgtttgtggtcgatatcaacattgatagtaccgctggcatctttgaacacgtagagatcgtcagagatgcgttcaacgatattgccgcgcagggttacccaggtgtcgtcacgcagggattttgcgctttctacagtcgttacgctgccgttcggcccctggaatcctccggcctgactttgcgttgcgcttgggccagaaaaaccgccctgctctgctgccatcaccggtgcgctgcacagggccattactgcgattactgctgcgaattttttcatgtttattactccctttaatgtctgtttccgagcatttaacaagatagtccttaacaacttcttaagggaaaaaaataaaatttagtgctgtacagagcgcgttacaacacggtttactggcagcaaatacggttatcgcagggatgaaaaaatgcgaattttactgatagaagatgacatgctgattggcgacggcatcaaaacgggccttagtaaaatgggttttagcgtcgactggtttacacaaggtcgtcagggaaaagaggcgctttatagcgcaccttatgatgcggtgatcctggatttaaccttaccaggcatggatggtcgcgatattttgcgcgaatggcgagaaaaaggtcagcgtgagccggtactgatcctgaccgcgcgcgatgcgctggcggaacgtgtagaagggctgcgtctgggagctgacgattatctgtgtaaaccttttgcgttgatagaagtcgccgccaggctggaagctctgatgcgccgaaccaacggccaggccagcaacgagctgcgccacggtaacgtcatgctcgaccccggcaaacgtatcgccacgctggctggcgaacccttaacactgaaaccaaaagaatttgccctgctggaattactgatgcgtaacgctggtcgggtactgagccgcaaactgattgaagagaaactgtatacctgggacgaagaggtcaccagtaatgccgttgaagtgcatgtgcatcatctgcgacgcaaactcggtagtgattttattcgtaccgtgcatggtattggttacacattaggtgagaaatgaaatttacccaacgtcttagtctgcgcgtcaggctgacgctaatctttttaattctggccagcgtgacctggctgctttccagctttgtcgcctggaaacaaacaacggataacgtcgatgaattgttcgacacccaactgatgctgtttgccaagcggttaagtacgctcgatctcaacgaaatcaacgcggcggatcgcatggcacagacgccaaatagattaaaacacggtcatgttgatgacgatgcgctgacctttgccatctttacccacgacggcagaatggtccttaatgatggcgataacggagaagatattccctatagctatcaacgggaaggttttgctgacgggcaactggtcggtgaagacgatccttggcgttttgtctggatgaccagtcctgatggcaaatatcgcatcgttgttggccaggaatgggaataccgtgaagacatggcgctggcgattgttgccgggcaattgatcccgtggctggtcgcactgccgattatgttaatcatcatgatggtactactgggtcgtgaactcgcgccgctgaacaaactggcgctggcactacgtatgcgtgaccctgacagcgaaaaaccactaaacgcgactggcgtacccagcgaagtgcggccactggttgagagcctaaatcaactgttcgcccgcacacatgcgatgatggttcgtgaacgacgctttacctccgacgcagctcacgaacttcgtagcccgttaacggcgctgaaagtgcaaaccgaagttgcgcagctctctgacgatgatccgcaggcgcggaaaaaagcactgctccaattacattccgggatcgatcgcgctactcgtctggttgatcaactgctcacgctaagccggctggacagtctggataaccttcaggacgtcgcggagatcccgcttgaagatctcctgcaaagcagcgtgatggatatttaccacacggcgcagcaggcgaaaattgacgtgcgactgacactcaatgcccacagcatcaaacgcaccgggcaaccgctattgctaagtttgttggtgcgaaatttgctggataacgccgtgcgctacagtccacagggcagcgtggtagacgtcacgctgaatgctgataatttcatcgtgagggataacggccccggtgtgacaccagaggcactggcgcgaattggcgaacgcttctatcgcccacccggacaaaccgctaccggcagcgggcttgggctaagcattgtccagcgaatcgccaaattgcatggcatgaatgttgaatttgggaatgcggaacaaggtggatttgaggcgaaggtaagctggtaacttctctgtctatgagagccgttaaaacgactctcatagattttattaatagcaaaatataaaccgtccccaaaaaagccaccaaccacaaaccagacaaataccgaggctgaatacatatacccaaaactcgaacatttcccgcataaagagttttcttaagataagaataataagtggcgtaagaagaaaaaatgctgcaatcattgcttgcaatatacgatcttcgccactaacggaaggtatactgcaaatatttcctccgctctcaagcatccagtcatacttattgaaagcaaaaaaagaatctattaaccaataagtaagcattatatatagcaatgcttcaaatattgttttaattttctgctttaacatatatcagtacgctcataaaaatccatttataattatcaacatgacacgttgatactttcatcttttacttattcaaagccatattttcaatccccaaaaaaaccgaaccaaacgtgtaaattattccggtgcgagtaagaattatgaggaatggctatcagtattgtcattttcagaaaatatttatcctgcatcggtgagtcagagtaagatcagacttttgctaaattcgcaaaagactttgcacattttgctaatttcaccgtaccgctctgtgacgtactatagtcggcaaacgtctcaccttgaggttaaaaaatgagcaacatcctgattatcaacggcgcgaaaaaattcgcccactccaatggtcaactgaacgacaccctgaccgaagtcgcggatggcacactgcgcgaccttgggcatgatgtccgcatcgttcgcgccgacagcgactacgatgtcaaagcggaagtacaaaactttctctgggctgatgtggtgatctggcagatgccaggctggtggatgggcgcgccgtggacagtgaaaaaatacattgatgatgtattcaccgaaggtcacgggacgctgtatgccagcgatggtcgtacccgcaaagatccgagcaaaaaatacggttccggcggcctggtacagggcaaaaaatatatgctttctctgacctggaacgcaccaatggaagccttcaccgaaaaagatcagttcttccacggcgttggcgttgacggtgtgtatctgccgttccataaagcaaaccaattcctcggtatggaaccgctgccgacatttatcgctaatgacgtgataaaaatgcctgatgttccccgctatactgaagaatatcgcaagcatcttgtggaaatttttggttaactagagctcaggctttagaaggagttaaccatgcttaccgtaatcgcagaaatccgtactcgtcctggtcaacatcaccgtcaggcggtattggatcagtttgctaaaatcgttccaaccgtactgaaagaagaaggttgccacggctatgcgccaatggtggattgcgcagctggcgtgagtttccagtctatggcaccggattctatcgtgatgattgagcagtgggaaagcatcgcgcatcttgaagcgcatctgcaaaccccgcacatgaaggcgtatagcgaagccgtaaaaggtgacgtgctggagatgaatatccgtattctgcagccagggatttaatcctgccttgtttgcccggccatcctgaccgggcaatgttctttcctttaaacctcaatctccgccatgtcgcctttctcttgcaaccagttgcggcgatcttcgctgcgtttcttcgccagcagcatatccatcatcgcgtcagtacgctgatcgtcttcatcatcgatagtcaactgcaccagacggcgagtgttcggatcaagcgtggtttcgcgcaattgcatcgggttcatttcccccagacctttaaaacgctggacgttcggcttgcctttcttgcgttttaattgctcaagtacgccctctttctcttcttccgtcagcgcgtaataaacctctttcccgagatcaatacggtagagcggtggcagtgcgacgtaaacgtgaccgtgtttcaccaacgcgcggaaatgttttacgaacaaagcgcagagcagcgtggcaatgtgcagaccatcagagtccgcatccgcgaggatacagattttgccataacgaagctggctcagatcgtcgctgtcaggatcgataccgatcgctacgctaatatcgtgcacttcctggctagccagcacttcgtcggaagagacttcccaggtgttaaggatcttacctttcagtggcatgatcgcctgatattcgcgatcgcgcgcctgcttggcagatccgcctgcggagtcaccttccacaaggaacagctcggtacggttaaggtcctgcgcggtacaatcagccagtttgccaggcaacgccgggccgctggtcagctttttacgcaccacttttttggccgcacgcatacggcgctgggcgctggaaatcgccatctccgccagcagttcagccgcctgaacgttctggttcagccacaggataaaggcatctttcaccacgccagaaacgaatgccgcgcattgacggctagagagacgctctttcgtctgcccggcaaactgcggatcctgcatttttacactcagcacataggcgcagcgatcccagatatcttccgcgctcagctttacaccgcgcggcagaatattgcggtattcacagaactcacgcatcgcgtccaacaggccctgacgcagaccattaacatgggtaccgccctgcatcgttgggataaggttgacgtagctttcggtcagcagttcaccgccttccggcagccacagtagcgcccagtccacagcttcagtatcaccagcgaaattaccgataaacggtttttccggcagcgtcggcagaccatttaccgcttccgccaggtaatcattcagaccgtcctgatagcaccagcgttgttcggtattgttgatctcatctttaaaagtgatctcaacgccagggcacaataccgctttggctttcagcacatgcgtcaggcgactaacagaaaatcgcgggctgtcaaagaaggtttcatccggccagaagtgcacactggtaccagtattgcgtttaccgcaagtgccgacaacctgtaaatcctgcaccttttcgccattttcaaaggcgatgttataaacctgaccatcgcggcgcacgttaacttctacgcgcttgctcagggcgttaaccacgctaatccccacgccatgcaggccgccagagaactggtaatttttgttagagaatttaccgcctgcatgcagacggcaaagaatcagttcaaccgccggtacaccctcttccgggtgaatatccaccggcatcccgcgcccatcgtcaataacttctaagctctggtcagcatgtaaaataacgtccacgcgttttgcgtgacccgccagtgcttcatccacactgttatcaatgacttcttgccccaaatggttagggcgagtggtatcggtatacatccccggacggcggcgaaccggctcaagcccggtgagtacctcaatggcatcagcgttataagtttgcgtcatggtttaagttagtaattcgagttgatcgtcagagatggtgcagaccaagaaaatcgacgatcgggttgaaataatcttcgaagcccgtgaatgcgtggttgccgccttctatgacagtctggcggcaggaagcgtagtacgccaccgcctggcggtaatccagcacttcatctcccgtctgttgcagcagccagatcaaatccggcgcttccagcgggtcaatctgcatgactttaagatcgtaaatatggcgactctctagcacatattgctgcccggtgtaggggttctcgttctgaccgagatagtccgtcagcagttcaaacgggcgcaccgccgggtttaccaccactgcgggcagcataaaacattgactcaaccaggtggcgtaatatccccccagactgctaccgacaatacccaggctatcaccgccatgttccaggacaatggattccagcagctctgccgcgtcggaaggatacggcggcaactgcggaatgatcatctcaacgtcagggtgatgttccgccagccagttttttaacaagctcgcttttgcagagcgcgggctgctgttgaaaccgtgtaaataaagaagcgtagacatcagtagccttcactagcggtatcaggttggaaacgtgtgtccgccaggcgatgcacctcggtggtcagcgtgccatcagcatgtaactcgagagtacgccagccgggcgcgatggtatccagcgtaaagttggaacagtgcggcttaaactgcacacaggtgctcggcgttgccagcaggcggcgaccattccagtcgagatccagctcctgatgaatatgaccgcacagcaagtatttgacgtgcggaaacttcgccagcacggtatccagttcgcccgcgttacgcagactgtgttgatcgagccaactacaacccgcaggtagcggatgatgatgcagcagcagcaacgtatggcgttctggcgcatcggccagtttacgttccagccactcaagctgaaactcgctcagctcaccgtgcggcacgccaaacacctggctatccagcaacaggatttgccattgctcaccaataaacacgcgcttcgccggggagatacccgcatcctgtaacgcgctgtacatcgcgggctggaaatcgtggttgcccggcagccagacgcagggcgcacgaaaacttgcgatgccttcagcgaaatgctgataggccgcagaggattgatcctgcgctaaatcacctgtcgcgacaatcaggtcgaattcgtgctggtgtggccgaatcgcctccagcaccgcctggtaactctcccaggtgtttacccctaacagggcttcgtgcttttgtgcaaacaggtgagtgtcggtaatttgtaaaatcctgactctggcctcaccagccagaggaagggttaacaggctttccaaatggtgtccttaggtttcacgacgttaataaaccggaatcgccatcgctccatgtgctaaacagtatcgcaaccagtccgctaaaaactgattaatttgatgcttttcgtcgcgttgatgcaactttttattaggataatcataccgcgctttgaagcgaaaaatctgctggctactacacacttcagccaccatcgcgtcatgatacagacgcaccgtcatactcggaaggctccagtaactgatcgcgggcgcagtctgttctattgtcaccagggtagtgtatcgggtgctttccacaatcgtcagccgatattgtgcgtttgccacctgatagcttacagtttcgccgggtgcgtcattgcgcggtaacaaacggcgcaattgactaaagttcatctcgcacaggcgcatcatttcaggaaagtcaggtgtgtaacgcttcatttatgcccactcattttttaacgcttgatgatgcagctgcagccattgcaaagcgatgacgctcgctgcgttgtcgattttcccctcttctacccactggtatgcctgttcccggcttaccacatgaacgcgaatatcttcgttttcatcagccagaccgtgaataccgcttgcggtcgtggcgtccacttcgcccaccataatactgctacgctcactggtgccccccgggcttgccaggaaacttaacaccggtttggtccgtttgactatcagtcccgcctcttcaatcgcttcgcgacgggcaacatcttccacactttcaccctcttcaatcatcccggcaaccatctccagtagccaaggggtttcgctggtgtcgtacgcggcaatccgaatctgctcaatcagcacaacttcatcacgcactgggtcaaagggtagcaagactgcggcgtgaccgcgctcaaaaatttcccgccgcacctcatgactcatttgcccgttgaatagacgatgacgaaatctataaagatctaaactaaaaaagccgcgataaagtgtttctcgtgcaataatttctacatcgtttttgccaaatgtaacgggcaggttgtctggcttaagcattgttaatgtcctggcactaatagtgaattaaatgtgaatttcagcgacgtttgactgccgtttgagcagtcatgtgttaaattgaggcacattaacgccctatggcacgtaacgccaaccttttgcggtagcggcttctgctagaatccgcaataattttacagtttgatcgcgctaaatactgcttcaccacaaggaatgcaaatgaagaaattgctccccattcttatcggcctgagcctttctgggttcagtagcttgagccaggccgagaacctgatgcaagtttatcagcaagcacgccttagtaacccggaattgcgtaagtctgccgccgatcgtgatgctgcctttgaaaaaattaatgaagcgcgcagtccattactgccacagctaggtttaggtgcagattacacctatagcaacggctaccgcgacgcgaacggcatcaactctaacgcgaccagtgcgtccttgcagttaactcaatccatttttgatatgagcaaatggcgtgcgttaacgctgcaggaaaaagcagcagggattcaggacgtcacgtatcagaccgatcagcaaaccttgatcctcaacaccgcgaccgcttatttcaacgtgttgaatgctattgacgttctttcctatacacaggcacaaaaagaagcgatctaccgtcaattagatcaaaccacccaacgttttaacgtgggcctggtagcgatcaccgacgtgcagaacgcccgcgcacagtacgataccgtgctggcgaacgaagtgaccgcacgtaataaccttgataacgcggtagagcagctgcgccagatcaccggtaactactatccggaactggctgcgctgaatgtcgaaaactttaaaaccgacaaaccacagccggttaacgcgctgctgaaagaagccgaaaaacgcaacctgagcctgttacaggcacgcttgagccaggacctggcgcgcgagcaaattcgccaggcgcaggatggtcacttaccgactctggatttaacggcttctaccgggatttctgacacctcttatagcggtagcaaaacccgtggtgccgctggtacccagtatgacgatagcaatatgggccagaacaaagttggcctgagcttcagcctgccgatttatcagggcggaatggttaacagccaggtgaaacaggcacagtacaactttgtcggtgccagcgagcaactggaaagtgcccatcgtagcgtcgtgcagaccgtgcgttcctccttcaacaacattaatgcatctatcagtagcattaacgcctacaaacaagccgtagtttccgctcaaagcagtttagacgcgatggaagcgggctacagcgtcggtacgcgtaccattgttgatgtgttggatgcgaccaccacgttgtacaacgccaagcaagagctggcgaatgcgcgttataactacctgattaatcagctgaatattaagagtgctctgggtacgttgaacgagcaggatctgctggcactgaacaatgcgctgagcaaaccggtttccactaatccggaaaacgttgcaccgcaaacgccggaacagaatgctattgctgatggttatgcgcctgatagcccggcaccagtcgttcagcaaacatccgcacgcactaccaccagtaacggtcataaccctttccgtaactgatgacgacgacggggcttcggccccgtctgaacgtaaggcaacgtaaagatacgggttatctgccgcattcttcccccttcagccttcaatttcgaccagccatcctctattctgatgggtatttaccactggtcccggaagacaaaaatgaaacggacaaaatccatacgccacgcatcgttccgcaaaaactggagcgcacgccatctgacaccagtcgctctcgcggttgccactgtttttatgctggctggctgtgaaaagagtgatgaaacagtgtctctctatcaaaatgctgacgactgtagtgctgcaaacccaggcaaaagcgccgaatgtaccaccgcgtacaacaatgcgctgaaagaagccgaacgtactgcgccgaaatacgccacccgtgaagactgtgttgctgaatttggtgaaggtcagtgccagcaggcaccagcccaggctggcatggcaccagaaaaccaggcgcaggcccagcaatccagcgggagtttctggatgccgctgatggccggttacatgatggggcgtctgatgggcggcggcgcgggatttgcacagcagccgctgttctccagcaaaaacccagccagtccggcttacggtaaatataccgacgcgacgggtaaaaactatggcgcagcccagccaggccgcaccatgaccgtaccgaagacggcaatggcaccaaaaccggcgaccaccactaccgttacccgtggcggttttggtgaatctgttgccaaacaaagcactatgcagcgtagtgcaaccggtacctcttctcgtagtatgggtggctgataccgatggaaagagtcagtattaccgagcgcccggactggcgtgagaaagcccacgaatacggtttcaattttcacaccatgtacggcgagccgtactggtgtgaagatgcttactacaagttgaccctcgcccaggttgaaaagctggaagaagtcaccgccgaactgcaccagatgtgcctgaaagtggtggaaaaagtgatcgccagcgatgagctgatgaccaaattccgcattccaaaacacacctggagttttgtgcgccagagttggctgacgcaccagccaagcctttatagccgtcttgatctggcgtgggatggcactggtgaacctaaacttctggaaaataacgccgatacgccaacgagtctatacgaggcggcgttctttcagtggatctggctggaagatcagcttaacgccggtaacttgccggagggcagcgaccagtttaacagtctgcaagaaaaactgatcgatcgcttcgttgagctgcgtgaacagtatggcttccagttgctgcatctcacctgctgtcgcgacacggtggaagatcgcggaaccattcagtatttgcaggactgcgcaacggaagctgaaattgctactgagttcctctacatcgatgatatcgggttaggtgaaaaaggtcagttcacggatttacaggatcaggtaatttccaacctgttcaaactgtatccgtgggaatttatgttgcgtgagatgttcagtaccaagctggaggatgcaggcgtacgctggctggaaccggcgtggaagagcattatctccaacaaggcacttctaccgctactgtgggagatgttcccgaatcacccgaacctgctgcccgcttattttgcggaagatgatcatccgcaaatggaaaaatatgtggttaaaccgatcttctcccgtgaaggcgcaaacgtgagcatcattgagaacggcaaaaccattgaagcagcggaaggtccgtatggcgaagaagggatgattgttcagcaattccacccgttaccgaaattcggcgacagctatatgctgattggtagctggctggtgaacgatcaacccgccggaattggcattcgtgaagaccgtgcattgatcacccaggatatgtctcggttttatccacatatttttgttgaataagccacgataccggatggcactcgccatccggtaattgttagcctatctgcacgctcagcatactcaggctgcccatttctataccctcaaccggaatggtaattggctcctgcccatcccacgcacctaacacatacaacaacggcaaataatgctctggcgttgggttgcttaacgtgccaccttcatggtcgaggtaattcaccagaggatgttgttccactggcccttgccacgtcagattcgctttcacatactcattaaagctcgtcgcccacggatacggactactatcaccgtgccacttcactgtgcgcaggttatgcaccacgttaccgctggcgaccaacattattccttcatctcgcagcgctgccagtttgcgccccatttcgaaatgccaggcggcaggtttgctactgtcgatactcaactgcaccatcgggatatcagcgtcaggatacatcttaatcagcacgccccagctgccgtggtcaaagccccaggcttctttatccagcgtcaccgggatcggcgctaacagctcaaccagacgctgtgccagcgcagggctacccggagcaggataatgcgtatcgtacagcgcctgcgggaagccaccaaagtcatgaatcgtgggcggcgtctccatcgcggtcactcctgttccacgggtaaaccagtgagcgctaaccaccacaatcgcttgcgggcgtggcaatgtcatccccaacttctgccagctgcgggtatacaaattatcttccagcacgttcatcggactaccgtgacctaaaaacaatgctggcatacgtgtactagacatgatgatatccttaactaaaggtgtcattttgatatcctcacaatacgcttgttcggcggagtaagaacccggataacaatgatgatgatcatcagttattttgacgatctgcctgaaggtgaagatttataaggagttgtcgatgagtgtacctctcattctgaccatactggcgggggcagccacgtttattggcgcgtttctcggcgttctcgggcaaaaacccagcaaccgcttactggcgtttagcctaggttttgcggcggggatcatgttgctcatcagtttaatggaaatgcttcctgccgcactagcagctgaaggaatgagccctgtgttgggttatggaatgtttatcttcggtctgcttggctattttggcctggaccgcatgttgccacatgctcatccgcaggatttaatgcaaaaaagcgtgcagccgttgccaaaaagcatcaagcgcacagccattctgctcactctcggcatcagtctgcataacttcccggaagggattgccacctttgtcacggcgagcagcaacctggagctgggatttggcatcgcactggccgtcgcgttgcacaatatccctgaaggtctggcagtggcaggcccggtttatgcggcaacggggtctaaacgcaccgcgattctgtgggcggggatttctggactagcagaaattcttggtggtgtgctggcgtggttaatcctcggtagcatgatttccccggtggtcatggcggcaatcatggcggcggttgcaggaattatggtggcgctcagcgttgatgaattaatgccgctcgccaaagagattgaccctaataataaccccagctatggcgtactatgtggaatgagtgtgatgggattcagtttagtgctgctacaaacggcgggaattggttaaaaacaacatcagaagttgtccagcgcatggacaacttctgccagcttcacgaaagccttattctaccttttcggctgtctcttctctcgtactgtttaagtatttgttccgcgcttcaagcagtgcgtctctgtcctggcgaaacgcccgacaataacgtttcaaatgcaggaaataacccaccacaaccagagcaatcaatacaatccagtaccaggcgataaacatccttttacccttaatatttaacaatactaaacatttagcgtataaatttcacatatcctttttcggatatattcatatggtcgcataataacggaacaattatatgattttgatcataatgaaaaagaatgcctgatattaatgaaattttctcatagaaagagaagcggaattaacatcttgcatagcagggaaaaataaaaaccgaagcctgctacaacttcggtttcttgattaaggcagtaaattaagcagcggttttcagctggctttacgctcatgtgcctgacggtatgccaccaggtcttcaatagtcacgagcgccatattgtgtttattggcaaactcaatacactctggtgcacgcgccatcgtgccatcgtcattagtcagctcacacagtacaccagccggtttaaagcctgccagcgtcatcagatcaatagttgcttcagtatgaccgccacgcgtcagtacaccacctgcctgagcgcgaagtgggaaaacgtggccaggacgattcagatcactcggttttgcgccatcggcaatcgctgcgcgaacggtcgtaatacggtcagcggcagaaacaccggtagtcacaccttcagctgcttcaatggtcacggtaaaaccggtgccataggcgctggtgttattttctaccatcattggcagatcgagttgtttacggcgatcttcagtaatgcacaggcaaacaataccgctaccgtggcgaatggtcagcgccatctgctcaacagtcatggtttctgccgggaagatcatatcaccttcgttttcacggtcttcatcatcaagcaccattacaccgcgtccttcacgcagcgcagccagtgcattttcaacacgttcgaaaggcgtaccaaaagaggaaagtagcgtctgattcatggtaaaaaaacctcactaaaattatggttaccagaatcagggcagtcttaggagtggcggcatatagccaaaataacgtgagcgggtccatgcccgacagaatcgttactctctcccatccggactctaaccgtcggccccggaattacaccggatctgctgtcctttgagttcgcacccaaagcgctcgcgggctttcaactgagttgatttaccgccggtggggaatttcgccccgccctgagaataagcggattcactataacgctaatgattagcggcagcaacgcatagcttcacataattctggtttatatctaatacaaacactaaaacgggccatcaggcccgttatatcagtgctctaactccagctctcttgcctgcatcatctgttgacaataccaggcataacgtgcgcaaaaccaggttctatgttcttcatccatgttaccagtaacggccagaatatcgaccgggcgaccttctgcgtgcattctggcaaaactacgcgccaggaaatcgaaattatttaaagaattaagactatgatccataagcacatcctccggttatcgcataccttttaaggccatatgctttttctgatttcagtattccccaatcagtgtagtgcctttaaacataacgtgcgtaaatatattgtccccgatcacactttttagtgaaaaataaaaaaccatattaaaagactttctcttccagaacttctctaacctgtgttattattaacacagataaatgtaagcaaggaaactattacaaagtaaatattgcgtcactaaatggacattggagtgatatatgattttattcgccgactataacaccccttatcttttcgctatttcctttgtactgttgatcggcctgttagaaatttttgcgcttatctgcggtcacatgctctccggtgctcttgatgcacatcttgaccattatgattctataaccacaggtcatattagccaggcacttcattatctcaatattggaagattgccagctctcgtcgttctctgcttactggctggtttttttggtcttattggcatcctgttgcagcatgcctgcatcatggtctggcaaagtccactgagcaacctgttcgtggttcctgtcagtttactgtttacgattattgcggtgcattataccggtaaaatagttgcgccctggattccacgcgaccatagtagtgctattacagaagaagaatatattggtagcatggcgttaattaccggtcatcaagccactagtggtaatccctgcgaaggaaaactcaccgatcaatttggccaaatacattatttactactggagcctgaagaaggaaaaattttcactaaaggagacaaagtgttaattatttgccgactttctgcaacgcgatatttggcggaaaataatccctggccccaaatattgtaatttattaatcaaaaggaaatttaataatggatgatattgttaattctgtgccctcctggatgtttaccgcaattattgccgtatgcattctgtttattattggaattattttcgccaggctctatcgtcgcgctagcgcagagcaagcttttgttcgtactggtttaggtgggcaaaaagtggtaatgagcggtggcgcaatcgtgatgccgatctttcatgaaataatccccatcaatatgaatactctgaagctggaagtcagccgcagtaccattgatagcctgattacgaaagatcgtatgcgcgtcgatgtagtagtcgctttctttgtgcgggtaaaacctagtgtagaagggattgccaccgctgcccagacgctggggcaacgcaccctgagccctgaagacttacgtatgttggttgaagataaatttgtcgatgccctccgtgcaacagctgcgcaaatgaccatgcatgagttacaggatacccgcgagaactttgtgcagggggtgcaaaatacagtggcagaagacctgagcaaaaacggtctggaactggagagcgttagtcttaccaactttaaccagaccagcaaagaacatttcaatccgaacaatgcctttgacgccgaaggtttaaccaaactgactcaggaaacagagcgccgtcgccgcgaacgtaacgaagttgaacaggatgtagaagttgcggtgcgtgaaaaaaatcgcgatgcgctaagccgcaagctggagattgaacagcaagaagcgtttatgacgcttgagcaggagcagcaggttaaaacccgtactgccgaacagaatgcacgtattgcggcttttgaagctgaacgtcgtcgtgaagcagagcagacacgaattctggctgaacgacagattcaggaaacagaaatcgaccgcgaacaggccgtccgcagtagaaaggttgaagctgaacgtgaagttcgcattaaagagatcgaacagcagcaggtcaccgaaatcgctaaccagacgaaaagcatcgctattgccgccaaaagcgaacaacagtcccaggcagaagcgcgtgctaatctcgcacttgcagaagcggtaagcgcccaacaaaacgtagaaaccactcgccagactgccgaagccgatcgtgctaaacaagttgccctaatcgctgccgcgcaggatgcagaaaccaaagcggttgaactgaccgtgcgggcgaaagcagaaaaagaagccgcagagatgcaggcggcggctatcgttgagttagccgaagctacacgtaaaaagggtctggcggaagcagaagcacaacgtgcgctgaacgatgctatcaacgtactttctgatgaacaaaccagccttaaattcaaactggccttgttgcaggcgctgcctgcggtaatagagaaatccgttgagccgatgaagagtatcgacggtatcaagattattcaggtcgatggtctgaatcgtggcggcgctgcgggtgatgcaaacacgggtaatgtggggggcggaaacctggcggaacaagcattaagtgccgctctctcttaccgcacacaggcaccgctgattgactccttgctcaatgaaattggcgttagtggcggcagtctggcggcattgactagtcccttaaccagtacaactcccgtcgaagaaaaagcagagtaaaccctcttccaggaataatccctggcccaaaaagccggggattttttatatctgcgttccgctaaaaagtgcaaatgatcaggttgttgcagcattttgcgtgacggctcggggaaggcaaaactgcatcagagaaagcattgcgtggggtctggcgctcatcaacaatcggggagtcagcagggggctgaaacgggaaagcccctcccgaagaagggggccttacagaaggaaagggttatgatgaagctcgtcatcatactgattgtgttgttactcgtaagtttcgcagcttattaacagccaatcagaggggggagaaatcctccctcacccttgttcctttactttaggttgaaaaaaaatcagcgtcaagaaggtttcattaacacatatccctggcccaaaaagccggggattttttatatctgcgttccgctaaaaggtgcaaatgctcaggacgttgcagcgttttgcgtgaccgctcggggaaggcaaaattgcctctgggaaagcattgcgcggggtccggcgctcatcaacaatcggggggcagcaaggggctgaaacgggaaagcccctcccgaagaaggggccttgtataaggaaagggttatgatgaagctcgtcatcatactggttgtgttgttactgttaagtttcccgacttactaacaactcatcagaggggggagaaatcctcccttacccttgttcctttactctaggttgaaaaaacaacagcgtcaataggcctgccatgtacgaagcgagatctgtgaaccgctttccggttagccttttttatcctgttggatcttcttgatgatgttggtcgtgctgcaaccgtcttcaaagttgagcaccaacacttcgccaccgttggcccagacttctttactcccggcaatctcttctggtttatagtcgccgcctttcaccagcagatctggcaagatcccggcgatcaagcgctgcggcgtgtcctcttcaaagctcactacccagtcgaccgcttccagtgcgcccagcacaatcatacgctgttcgagtgggtttaccgggcgggaatcccctttcagccgtttggtggaggcatcgctgttgacggcaacaatcaagcggtcacccagcttgcgggcatttgccagataagagacgtgcccggcgtgcaggatgtcaaagacaccgttggtcatcaccactttttcaccacgtttacgcgctgccgctacggccagcttcagttcctcttcggtcatcacgccaaagcctgtatctgcacgtccacgtacagcattttccagctcgatcgggctaaccgtggaggttcccagtttgccgaccaccacgccagccgccgcattggcaaagaagcaggcttcttccaggctattacccgctgccagcgttgccgccaggacgccaatcaccgtgtcgcccgcaccggtaacgtcatacacttcctgcgcttgggttggcatatgcagcggcgctttacccggttgcagcaggctcataccctgttcggaacgggtcactaacagagcgctgagttcgtaatcggcaatcagtttcatgccgcgctcaacaatctcttcttcggtcttacatttaccgacaacagcttcaaattcgctgagattcggcgttaacagcgtagcgccgcggtagcgctcaaaatcggtaccttttggatcaatcagcaccggaacacccgctttacgcgccagttggatcatctgctgtacgcttgccagcgcacctttggcgtagtcagaaagcaccagcgcgccaatgctactcagcgcctgattaatccgctcgtgcagcggctgcggatcaacaccttcgaaaccttcttcaaaatccagacggatcagctgttggttgcgggaaagtacccgtaatttggtaatggtcggatgcgtcggtacagaaacgaagtcgcatttgacgttgacgtcggccagagatttactcagcgcgcgcgctgcatcgtcaatgcccgtcaacccgaccaggcgtgcattagcaccgagagaagcgatattcatcgccacgttagccgcgccgcccggacgttcttcgatggtattcactttaaccacgggcaccggcgcttccgggctgatacgactggtggggccgtaccagtaacgatccagcatcacatcaccaaccaccatcactcctgcacgttcaaactctggcagcgttactttcattcctgtctcctgagagattcaaaatttgcgcgcgataataccatacttcattcttccaccagccacttctgccagcttgcccgcaccagttcacgctctgcggtgaagcaatcctcgctcacatggcccggcaattcctgtaatgccagatgatgaagttcatcgcgaagcgtagtgtaagcacgggtcagcgccatcgcttcctgctcttccataatgtcgttttgcgccagtagttccagaatacgcacgttgtcactccagcgcgttaacttcggtttttcatgagcgtagcgcaacaccagatattgggtaataaattcgatatcggtaattcccccttcatcagctttgatatcaaagcgatcgcgatgtttattgccgagatgagcgcgcattttctcgcgcatttcccgcacttccgtttgcagagttttaccttcacgcggcagcgtcataatctcgcgacgcactgcgtcaaagtgcgcggtgagctgcggatcgccgtacactacacgcgcacgcaccagcgcctgatgttcccacgtccaggcctcgtttttctgataatcggcaaatgcttctgcggatgtcaccagcattcccgccgccccggacggacgcagtcgagcatccacttcatacaaaatgccggaagaggtacgcgtactgaacagatgcataatgcgttgcgccagacgcagataaaactgccgcccgtcgatttcccgctcaccgtcagtcatcgcatccattgggcaatcatggaggaagataaggtcaagatcggaactgtagcctaactcccagccgcccagcttgccgtagccgaccaccgcaaaaccacgcccttcgcgttcgttcaggtgattcggcttaccgtagcgggcaaccatttgaacccacgcctgctgaacgacggcatctatcatggcttccgccagccaggttaagtgatcgctcactttcatcaccggtagcgtaccggcgatatccgctgcggcgatgcgtaacagctgcgcctgtttgaactgacgcagcgcctcaagctgttgctcttcgtcatcttccggcacgcgcagcaaatactggcgcaactcatcgcggtaggcatcggtcgccgtcggctggtaaagggtgtttggatcgagcaattcatccagcaataatggataacgcgccagctggctggcaatcatcgggctcgcggcacacagagaaatcaaatgtttaagcgccgcggggaattcactgagcaattctaaataggtggtgcgggtaacaatccccaccagcaaggcggtaatgcggctcagcgtaacggcagcgtcttcacgcgcacagacatcacttagcagatgcggcatcagatggtcgagcacctgacgtcctcgcggcccgatggtgcgcttatccagctctttgcggaaatcggcaatcagcgttagcacctgtttgcgatcatcctcgctaagatgcgccagcactggcgtagtgtcatcttcctgcaacgcatcctgccacagctcacgccactgttcgctcaggctctcttcctgagtttcactttcatcgtcgccaatcaattcattaaacacccggcgcacattggtcatatgtgcggtcagcgccccggtcagttgcggccagtcagcaaagtccatcgcccacgccagccgcgcacgattaagctcatcagaaggaagcgtctgggtttgttcgtcgttaatgctttgcagcaggttttccagacgccgcaggaacagatacgccactcgcaattgttcagcatcgttttcagaaagcagatgcagctcggcaatggcgctgagcgttggcagtaaagagcggctttgcaggctcggttcgcgtccgccgcgaatgagctggaacacctgaacgataaattcaatttcgcgaatgccgcctgcgccgagtttgatattgtcggtcaaaccacgtcgacgcacttcacgggcaatcatccctttcatgttgcgcaggctctgaatcacgctgaaatcgatgtaacgacggaaaacaaacgggcgcagcatcgcacgcaactcgttagcatagacgccttcgctatcgcccataatccgcgccttgaccatcgcgtaacgctcccagtcgcgcccctgctcctggtaataatcttccaacgcggcaaagctcagcaccagcgggccactttcgccaaacggacgcagccgcatatccacgcgatagacgaagccatcctgcgttggttgatccagcactttaatcagccgctgccccatgcgggtaaaaaactgcgcgttatccagttcccggcgtccaccctgcgtacaaccatgttccggccaggcaaaaatcagatcgatatcagaggagaaattcagctccccaccgcccagcttacccatgcctaaaatcagcagcggttgcgcttcgccctgcgcattgcacggcgttccccactcgcggcagcaggcgtcatacagccagtcacgcgccgcaacaatcagcgtctccgccagatagctgagctgctgcaatatgctctcttcagtaaccagtgccagcgtttgcgcccaggcgatgcgcaccataatgcgccgccggaatagccgcagctcgcgcattaacccggcttcgtcactcacattacagagcgcctcctgcaaccatgccgcgtaatgctgccattcgtcggcctgcggcggttggctttccagttccgtcagccactctggatgcgcaatcacgctgtcctgcacaaaatcactaaaagtaagtacactcttcgcctgtgcgctaagactttcctcggctaaaggctctggcagccgctcaacaacggtctgccagtactgctgtaacggactagagagcggcttcataagcgattttatccttgcctgattaacgttttccgctgtgcaaccagaacggttcctgattgtttgcctcattacggaaatgttcaatttcgatgcgttgcccggtcgcaatagcgtgatgcagcccctgccagttctccagccaggcttgcgcgacgacaggatcatagtaacccgccagcaacagtatactgtcaatatcacgcgtcaggcgtggcaactggtcacggtagcgatcgcctaacggctggcagaaaacgcttttcagttcagcggcatggcgggaaagatggatatcggcaaagcgtttgaaggagtcgctgattttgccctgcgctttggcatctaaaaatggctgccatgctttgcttaccaaccattcggtcaacgccagcttcgccattgccgtttcggtagagtagaccgccgtcacggcagacaccgcagaagcaatggtcgcctcgcattgagtcagcagatcacgtaagtgagtgctcgctttacgcggcacaataccaccgaacagcatcagcgtatgacggaccaggctaatggctgccagcacctgttctttcgccgcatcgttgccgcgtacccacagttcttcatgatactgccattgcgctaacgccagctcgagcgccgcttccagcccctgttccacatcggcttttgccgcaacatgcaaaatggtggtcggtttgatttcacgcgccggattgccctgcgccagatgatagccacgcgccgctttgctcaggctgccctggcgtaatccggtttggcttaccagttggttcgccagtttcagcaccgcgcgcgtgtcgccgctaagcagttccagttccagctcacagataggttcagcaaattcacccgctttcacttccccctggtcgagggcgatttcaatttggctaccatcgaccgccaccagccatttttcgcgataaaaatcggtgctgaacagcggctgcacgcgggaggcgagatcggcgggcaattcgccgttcggccagacttccgtcggtaactgcgccaggtcgagcgtcggttcgctcaacgccacgttatattccgggcgctgatgtaagccgcctgtcactcttcctgcaactttcatggtcatctcatagcgaccgttttcgccacgaatacgtaagcccatatcgtgcccacgcagccagttatccggcgtttcgtagtaaatattcagcaactgcacggggtcatggtgctcgccgcccagcgtattgagatggtcacgcaacgcctcaacggcactgtgattaacaataaactttaattcgatttcctgagccatggcctttacttatcggttatgtcacataagtgacgatgaacggcgaacttaatgcgatcttttttgtcagtagatagtattttgcgccaaattgccatgcaacgggcaatttgacgggcgtaaaagtttgaagcagtggcaagacctgacacagaggattccgattgatgtcgaatgctttgcgtagcgacactgatgccactactatcgttccactttccatgacaataacgacagcctgatgccaaaattacgcctgatcggattaactttactcgcacttagcgcgactgccgtcagtcacgctgaagaaacgcgctatgtttccgacgaactgaatacctgggtccgcagcggtccgggagatcattatcgcctcgtgggcacggttaacgccggcgaggaagtgaccttattacaaactgacgccaacaccaattatgcccaggtgaaagacagctctggccgtaccgcctggatcccgttgaaacaacttagcactgagccaagcctgcgctcccgtgtgccagatctggaaaatcaggtcaaaaccctgaccgataaactcaccaatatcgataacacctggaatcagcgcaccgcagaaatgcagcaaaaagtggcgcagagcgacagcgtgatcaacgggttaaaagaagaaaatcagaaactgaaaaacgagctgattgtcgcgcagaaaaaggtcgatgccgccagcgtacagctggatgacaaacagcgcaccatcatcatgcaatggtttatgtatggcggtggcgtgctggggcttggcttgctgctcggtctggtactgccgcacctgatcccaagccgcaaacgcaaagatcgctggatgaactaaatcgccttcttcgttgcactgtcttattattaggaattgtgtatttgacgaagggatgatggcgtgaagatttatctggtcggtggtgctgttcgggatgcattgttagggctaccggtcaaagacagagattgggtggtggtcggcagtacgccacaggagatgctcgacgcgggctaccagcaggtaggccgcgattttcctgtgtttctgcatccgcaaacgcatgaagagtatgcgctggcacgtaccgaacggaaatccggttccggttacaccggttttacttgctatgccgcaccggatgtcacgctggaagatgatcttaagcgtcgcgatctgaccattaatgcgctggcccaggacgataacggcgagattatcgacccgtacaacggtctgggcgatctgcaaaatcgtctgttgcgccatgtttcccccgcttttggcgaagatccgttacgcgtattgcgcgtggcgcgttttgctgcgcgttatgcccacctcggttttcgtattgccgatgaaactctggcgttgatgcgcgagatgacccatgcgggtgaactggaacacctgacgcctgaacgggtatggaaagagacggaaagcgccctcaccacccgcaatccacaggtgttcttccaggtactgcgcgattgcggcgcactgcgcgttttattcccggaaattgacgcactgtttggcgttccggcccctgccaagtggcatccggaaatcgatacgggtattcataccttaatgacgctcagtatggcggcgatgctgagtccgcaggtcgatgtccgtttcgcaactttatgccacgatctcggtaaagggctgacgccgccagaactctggccgcgtcatcatggtcatggcccggcgggtgttaagttagtggaacaactatgccagcgtctgcgcgtgccaaatgaaattcgcgatttagccagactggtggctgagtttcacgatctcatccacaccttcccaatgctgaacccaaaaaccatcgtcaaattatttgattccatcgatgcctggcgtaaaccgcagcgtgtcgagcaactggcgctgaccagcgaggctgacgtgcgcggcagaaccggttttgaaagtgcggactacccgcaaggccgctggttgcgcgaagcctgggaagtggcgcagagtgtgccgacaaaagccgtcgttgaagcgggatttaaaggtgtggagattcgcgaggagctgacccgacggcggattgcggcggtagccagctggaaggaacaacgttgcccaaagcctgaatgagtattgggcattttgccggatgcggcgtaaacgccttatccggctacatgtcaacgacagttgtaggcctgataagacgcgcaagcgtcgcatcaggcgttgattgccggatgcggcgtgaacgccttattcggcctacgcaatcgttgacaacgccaagcatccgacactattcctcaattaaaagaacacgacatacaccgcagccgccacaataaagcgataaatggcgaacgggataaagctaatgcgcttaatcaattgcaggaaggttttaatcgctatcagcgccaccacaaaagcggtgataaacccaacggcaaacatcgggatatcgccgcttgtcaggaagccccagcttttgtagagatcgagcgccgttgcgcccatcatcatcggcaccgccagcaggaagctaaactcggaagcagcgtaacggctcacccccatcagcatcccaccactaatggtcgccccggaacgggagaaacccggccacagcgccagacactggaaacagccaatcataaatgcctgacgataggtcatatcatcaagacccggcgcacgcggctctttcggcttcaggcattcggcggcaatcagcaacaaaccgccaacgaccagcgcatacatcacatttatcgggttaaacaaactcttaatcgtgtcgtggaacaacagccccaataccaccgccggaatcatccccagcaaaatgtggatcagcgttaaacgacctttgctttcaccttcgtgctgcaacgggcggccaaagtggatgccaatcaggccaaacagacgccgccagaacatcactactaccgccagaatacttcctaactggatcacaacttcaaaggttttcgccgtgtcgccctcaaaccccaacaagtgaccgacaataatcatatggcccgtgctggataccggcagaaattctgtcaatccttcgaccacacccaatattgccgctatcagcaggctgtgcatatcgctcatcaataaacccctaaattattaaaatgtaccgcttgtccgaactactgcgtatgaccaggttataaccgtttggtttaacagctgtaaaattaattattttctttcagattattgccacgctcaatgattacgccaacattcgccgcccgcgccactgcgcctggcttgctgagtttgatacgcacccacgggctgttgaagcgtgctaacagcagctccgccacctcttcagccacgcgttccaccagcgcaaaacgcgccccctcgacgtggctgaccaccgtttctgcaatgtcagcgtaactgaggcaatccgccacatcatcacttttcgccgctttacggttatcccacgccatttcgatatcgaacactaacttctgttcgatggtctgttcccagtcgtaaacaccaatagtggtgattacgctaagttgctctataaatacaatatccatcacgtcctgcctgctttttggctaaccggataccacttccggcgaaatgtgcgtattatccacagattcatcgttgaacacgaattttcaaaacggaacagcttatgagtgcaatcgcgcctggaatgatcctcatcgcgtacctctgcggctccatttccagtgccattctggtttgccgcttgtgtgggctgcccgatccgcgaaccagcggctccggcaatccaggcgcaaccaatgtgttacgtatcggtggcaagggagcagccgtagcagtactgattttcgacgttctgaaaggaatgttgcccgtctggggcgcgtatgaattaggtgtcagccccttctggctaggcttaattgccatcgccgcctgtcttggacacatctggcccgttttcttcggatttaaaggaggaaaaggcgttgctaccgcttttggtgccatcgcacccattggctgggatctcaccggagtaatggcgggaacctggttactgaccgtgctattgagcggatacagcagcctgggagcgattgtcagtgcactgattgctccgttttatgtctggtggtttaagccacaattcaccttcccggttagcatgctctcttgcctgatcctgctgcgtcatcatgacaacatccaacgtctgtggcgtcgtcaggagacaaaaatctggacgaaattcaaaagaaagcgcgaaaaggatcccgagtgatttctggtggatttacatgacctgatagccttcatcgggcttgcccagccgttgctggcaccatgccgccagaaattccacgcagacacgtaatttcatgctgcgatagagcggctcccggtaaacagcccagatattggcgctttgtgcatactctggcaatacttgcaccagtttgccactctccagaaacggcaacacatcccactcggaacgcagcataatccctttgccctccagcgcccattgcagcacaatctcgccgctattggaggaaagatgcccgcttaccttcacgctttttttctcctgaccgttccccaactcccatattccatgggtcatatcgcgctctttggtcaccagacagtcatgacgacttaattcctgtagggattgtggctgcggatatttttgcagatactcaggtgctgcgcataatattcttttattttttgtcaaaagatgcgcaatataataatcaggaatttcgtcattaatacgaatatccagatcaatattatcctgcactaaatcaatttgccgatcgaacaattcaaaatgcacctgtaactcaggataattgcgcatcagttcggtaatagctggcgcaatatggctgcgcccaaaaccaaaactgcaaccaatacgaatcatcccctccgggcgcgttttgatttgcgtgacgtcatcgaccagtcgctgatattgggtgaggatttccaacgcatgttcgtaacaacgttggccactttcagtcagcgccacgccgcgagcggagcggttcagcagcgttgttgccagcgtattttcaaggatttggatccgcttggtgacaaatgcaggcgtctgcccaagcgtcgccgctgcggcgctaaaactcccgctgtgaacgatttctaccagtacctgcaagtctttggctaaaggccagctattcagcatcgttaattatccgcagttgtgataagcgcagtgtatttcgcaaaacattgccattccctgctctggcgcaatattcattcttattttcgcgttgattcacgaactgttaattacatattcacggtggcaaaaaatataaaaccacatttttagtggtagtttgtggcggtgaatttttccagacaaatacaaaaactggagttgccatgatgagcgaaagtaataagcaacaggcagtgaataagttgacagagattgtcgctaactttaccgccatgatttctacccgaatgcctgatgacgtggtggataaactaaaacagctaaaggatgccgaaacgagcagcatggggaaaattatctaccatacgatgttcgacaacatgcaaaaagcgattgacctgaatcgtcctgcctgtcaggacaccggggagattatgttcttcgttaaagtcggttcccgcttcccactgcttggcgagctgcaaagcatactcaaacaagccgtggaagaggcaaccgtcaaagcgccactacgtcacaatgcggtagaaatttttgacgaagtaaacaccggcaaaaataccggtagcggcgtaccgtgggtcacctgggacatcatccccgacaatgacgatgcggaaatcgaagtttacatggcaggcggcggctgcacgctacctggccgcagcaaagtgttaatgccgagtgaaggctacgaaggcgtggtgaaattcgtcttcgaaaatatctccaccctcgccgtaaacgcctgtccaccggtactggtgggcgtgggcatcgccaccagcgtggaaaccgccgccgtactcagccgtaaagccattttgcgcccgattggcagccgccatcccaatccaaaagcggcagaactggagctacgcctggaagaaggactcaaccgtctggggattggtccacaagggctgaccggcaacagtagtgtgatgggcgtacatatcgaatctgccgcccgccatccgagtaccatcggcgttgctgtctctaccggctgctgggcgcatcgtcgcggcacgctgctggttcatgccgatctcacctttgaaaatctgtctcacacccggagcgcgttatgaaaaagatcctgacaaccccgatcaaagctgaagatctgcaagatattcgcgtcggcgatgtgatctacctgaccggtacgctggtgacctgccgcgacgtttgtcaccgccgtttgatcgaactgaaacgtccgatcccttacgatctcaacggcaaagcgattttccacgctggccccatcgtgcgcaaaaacggcgacaaatgggagatggtctccgtcggcccgacaaccagtatgcgtatggaaagttttgaacgtgaatttattgagcagaccggcgtgaaactggtggttggcaaaggtggtatggggccgctgaccgaagaaggctgccagaaattcaaggcgctacatgtgattttcccggcaggctgcgcggtgctggcggcaacccaggtggaagagattgaagaagtgcactggacagagctcggaatgccggagagtctgtgggtctgccgggtcaaagagttcggcccgctgattgtctctattgatacccacggcaacaacctgatagccgaaaacaaaaagctgttcgccgaacgccgcgatcccatcgtggaagagatctgcgagcacgtccattacatcaaataaccctcccggagaggctcacccctctcctttttcgcaggcataacacgatgaaaccttccactgaatggtggcgatatcttgcgccgctggcggtcatcgccattattgctctacttccggttcccgcagggctggagaaccatacctggctctactttgccgtttttactggcgtgatcgttggactgatcctcgaacccgtgccgggtgccgtggtggcgatggtgggtatatccatcatcgccatactctctccctggctgctgttcagcccggagcagctcgctcagccaggctttaaattcactgcaaaatccctcagctgggccgtttccggtttttctaatagcgttatctggctgattttcgccgcctttatgtttggcacaggctatgaaaaaaccgggcttggacgccgcattgcgctgattctggtgaaaaagatgggacatcgcacgctgtttctcggctatgcggtgatgttctccgagctgatcctcgcacctgtaacaccgtccaacagcgcgcgtggtgcggggattatctatcccatcatccgtaacctgccaccgctctatcaaagtcaaccaaacgacagcagtagccgcagcattggcagctacatcatgtggatggggattgttgccgactgcgtgaccagcgccattttcttgacggcgatggcaccaaacttgctgttaattggactgatgaaaagcgcatctcacgccacgctgagttggggcgactggttcctcgggatgttgccgctcagcattttactggttctgctggttccctggctggcttacgtgctgtacccgccggtactgaagtctggcgatcaggtgccgcgctgggcagagacggaactgcaggcaatgggcccgctctgtagccgtgaaaaacggatgctggggctgatggtaggcgcgctggtgctgtggattttcggcggtgattatatcgatgccgcgatggtcggttacagcgtggtggcactgatgctgcttctgcgcattatcagttgggacgacattgtcagtaataaagcggcgtggaacgttttcttctggctggccagccttatcaccctcgccaccggactcaacaacaccggttttattagctggtttggcaaactgttagcaggcagcttaagcggttatagcccaacgatggtgatggtggcgttgattgtggtgttttatctactgcgctactttttcgccagcgccacggcgtatacctccgctctcgcaccgatgatgattgctgctgcgctggcgatgccggaaatcccgctgccggtgttctgcctgatggttggtgcggcaattggtctggggagcattcttacaccatacgccaccggccccagtccgatttactacggcagtggttatctgccaacggcggattactggcgactgggggcgatttttgggctgatattcctcgtattgctggtgattaccggcttactgtggatgcccgtggtgttgctttaagtgaggacggtgccggaaattgctctccggcacccaatagttttacgcagccggtaactccgccagcggccagcgcggacgcacgctaacgccgagatccgccgtcgcgcctgctttaaaccgcaccattccggcataggcgatcatcgcgccgttatcagtacaaaattccggacgcgcgtagaacacttcgccgcggcgttttttcatcatttcagccagcttcgcccgtaacgtacggttagcactcacgccgcccgccatgaccagtcgcttaaagcccgtctgatccagcgcccgcttgcacttaatcatcagcgtatcgaccaccgcatcttcaaaggcgcgggcgatatcagcacgcgtctggtcgtcggtgccgttgtcacgaatggtatttgccgcgaaggttttcaggccggagaagctgaaatccagccccggacggtcggtcatcggacgcgggaagacaaagcgcccggcagtaccctgagccgccattttgctcagtaacggcccgccaggataatccagccccagcagcttcgcggttttatcaaacgcttccccggcggcatcatcgatagactcgccgagcagctcgtactgaccaatgccagtcacgctgattaactgcgtatgaccgccggaaacaagcagcgcaacaaacggaaattccggcgggttatcttccagcatcggcgctaacagatgcccttccatatggtgtacagggatcgccggaacgtcccaggcaaacgccagagaacgccccacggtcgcgccaaccagtagcgcgccgactaatccagggcctgcggtataggccacagcatcaatgtcttttgccgttaaaccagactcctttagcgccgcctggatcaacggtacggttttacgcacatgatcgcgggaggccagttcaggcacgacgccgccgtagtcagcgtgcaatttcacctgactatacaattggttggctaacaaacctttttcatcgtcgtaaatggcgatgccggtttcatcgcaggaagtttcaatacccagtacacgcatgacttgttttacctcgctttattaccgcgcagtgtaggaccaatgcgggttgatgtaaaactttgttcgcccctggagaaagcctcgtgtatactcctcacccttataaaagtccctttcaaaaaaggccgcggtgctttacaaagcagcagcaattgcagtaaaattccgcaccattttgaaataagctggcgttgatgccagcggcaaaccgaattaatcaaaggtgagaggcacatgccggtaattaaagtacgtgaaaacgagccgttcgacgtagctctgcgtcgcttcaagcgttcctgcgaaaaagcaggtgttctggcggaagttcgtcgtcgtgagttctatgaaaaaccgactaccgaacgtaagcgcgctaaagcttctgcagtgaaacgtcacgcgaagaaactggctcgcgaaaacgcacgccgcactcgtctgtactaattccccgagagcgttgctctccgatcagaccgagttgtagttgtaaggccgtgcttccgaaaggaatgcgcggcttattttcgtttatgaattgctaaaaatcggggcctatggctggacgaatcccacgcgtattcattaatgatctgctggcacgcactgacatcgtcgatctgatcgatgcccgtgtgaagctgaaaaagcagggcaagaatttccacgcgtgttgtccattccacaacgagaaaaccccgtccttcaccgttaacggtgagaaacagttttaccactgctttggatgtggcgcgcacggcaacgcgatcgacttcctgatgaactacgacaagctcgagttcgtcgaaacggtcgaagagctggcagcaatgcacaatcttgaagtgccatttgaagcaggcagcggccccagccagatcgagcgccatcagaggcaaacgctttatcagttgatggacggtctgaatacgttttaccaacaatctttacaacaacctgttgccacgtctgcgcgccagtatctggaaaaacgcggattaagccacgaggttatcgctcgctttgcgattggttttgcgccccccggctgggacaacgtcctgaagcggtttggcggcaatccagaaaatcgccagagtttgattgatgcggggatgttggtcactaacgatcagggacgcagttacgatcgtttccgcgagcgggtgatgttccccattcgcgataaacgcggtcgggtgattggttttggcgggcgcgtgctgggcaacgatacccccaaatacctgaacagcccggaaacagacattttccataaaggccgccagctttacggtctttatgaagcgcagcaggataacgctgaacccaatcgtctgcttgtggtcgaaggctatatggacgtggtggcgctggcgcaatacggcattaattacgccgttgcgagcttaggtacgagtaccaccgccgatcacatacaactgttgttccgcgcgaccaacaatgtcatttgctgttatgacggcgaccgtgcaggccgcgatgccgcctggcgagcgctggaaacggcgctgccttacatgacagacggccgtcagctacgctttatgtttttgcctgatggcgaagaccctgacacgctagtacgaaaagaaggtaaagaagcgtttgaagcgcggatggagcaggcgatgccactctccgcatttctgtttaacagtctgatgccgcaagttgatctgagtacccctgacgggcgcgcacgtttgagtacgctggcactaccattgataagccaagtgccgggcgaaacgctgcgaatatatcttcgtcaggaattaggcaacaaattaggcatacttgatgacagccagcttgaacgattaatgccaaaagcggcagagagcggcgtttctcgccctgttccgcagctaaaacgcacgaccatgcgtatacttatagggttgctggtgcaaaatccagaattagcgacgttggtcccgccgcttgagaatctggatgaaaataagctccctggacttggcttattcagagaactggtcaacacttgtctctcccagccaggtctgaccaccgggcaacttttagagcactatcgtggtacaaataatgctgccacccttgaaaaactgagcatgtgggacgatatagcagataagaatattgctgagcaaaccttcaccgacagtctcaaccatatgtttgatagcctgcttgaactgcgccaggaagagttaatcgctcgtgagcgcacgcatggtttaagcaacgaagaacgcctggagctctggacattaaaccaggagctggcgaaaaagtgatttaacggcttaagtgccgaagagcgatcgggaagcccccgacagccgcactgagaggcagcggcaaatatataagtacgccctcgtaattatcgttggcggtaaacaaccgttggatttcagcgttaacggctgaaggacatcgggtcaatcgcccaacaccaacctcatgaaataagtgtggataccgtcttatggagcaaaacccgcagagtcagctgaaacttcttgtcacccgtggtaaggagcaaggctatctgacctatgccgaggtcaatgaccatctgccggaagatatcgtcgatagtgatcagatcgaagacatcatccaaatgatcaacgacatgggcattcaggtgatggaagaagcaccggatgccgatgatctgatgctggctgaaaacaccgcggacgaagatgctgccgaagccgccgcgcaggtgctttccagcgtggaatctgaaatcgggcgcacgactgacccggtacgcatgtacatgcgtgaaatgggcaccgttgaactgttgacccgcgaaggcgaaattgacatcgctaagcgtattgaagacgggatcaaccaggttcaatgctccgttgctgaatatccggaagcgatcacctatctgctggaacagtacgatcgtgttgaagcagaagaagcgcgtctgtccgatctgatcaccggctttgttgacccgaacgcagaagaagatctggcacctaccgccactcacgtcggttctgagctttcccaggaagatctggacgatgacgaagatgaagacgaagaagatggcgatgacgacagcgccgatgatgacaacagcatcgacccggaactggctcgcgaaaaatttgcggaactacgcgctcagtacgttgtaacgcgtgacaccatcaaagcgaaaggtcgcagtcacgctaccgctcaggaagagatcctgaaactgtctgaagtattcaaacagttccgcctggtgccgaagcagtttgactacctggtcaacagcatgcgcgtcatgatggaccgcgttcgtacgcaagaacgtctgatcatgaagctctgcgttgagcagtgcaaaatgccgaagaaaaacttcattaccctgtttaccggcaacgaaaccagcgatacctggttcaacgcggcaattgcgatgaacaagccgtggagcgaaaaactgcacgatgtctctgaagaagtgcatcgcgccctgcaaaaactgcagcagattgaagaagaaaccggcctgaccatcgagcaggttaaagatatcaaccgtcgtatgtccatcggtgaagcgaaagcccgccgtgcgaagaaagagatggttgaagcgaacttacgtctggttatttctatcgctaagaaatacaccaaccgtggcttgcagttccttgacctgattcaggaaggcaacatcggtctgatgaaagcggttgataaattcgaataccgccgtggttacaagttctccacctacgcaacctggtggatccgtcaggcgatcacccgctctatcgcggatcaggcgcgcaccatccgtattccggtgcatatgattgagaccatcaacaagctcaaccgtatttctcgccagatgctgcaagagatgggccgtgaaccgacgccggaagaactggctgaacgtatgctgatgccggaagacaagatccgcaaagtgctgaagatcgccaaagagccaatctccatggaaacgccgatcggtgatgatgaagatagccatctgggggatttcatcgaggataccaccctcgagctgccgctggattctgcgaccaccgaaagcctgcgtgcggcaacgcacgacgtgctggctggcctgaccgcgcgtgaagcaaaagttctgcgtatgcgtttcggtatcgatatgaacaccgactacacgctggaagaagtgggtaaacagttcgacgttacccgcgaacgtatccgtcagatcgaagcgaaggcgctgcgcaaactgcgtcacccgagccgttctgaagtgctgcgtagcttcctggacgattaatcggtaggccggatcaggcgttacgccgcacccggcactaggccctctgcacaaacgccaccttttcggtggcgttttttatcgcccacgcactaccagcgcctggtccagctcgcgatacgcttcaaccagtttctccagactaacgcgacttaaaccgctgggatttggcagcacccaaatctgcgtgctaccaatggtgagcgtttgtttcccccactgtgcaccgcgctggctgaatccctgttcatatgcttgtttgcccagaatcgccaacgcctgcggctgataatcttcaattttttcaatcagcttacgcccgcctgcgtgtagctcctgcttactaacttcattggcttgcaccgttggacggtctaccagtttggtgacgccacaacgataatccagcagatgctgtgcctcctgcggcttcaactgacggtcggtaaacccggcctgatatatcaccttccagaagcgatttgccggatgagcaaagggaaaaccagtcccggcggaactaagcccagggttgataccgcaaaacacgacccgtaaccctggagccaaaatatcctcaaccatatttactcctttctaacatcaccaggaaaagtataacggattgaaaatacattgtttataaaaacagcaggcgcgcggtaatggctggattgcgacacggagttactttataatccgctaccatggccccttagctcagtggttagagcaggcgactcataatcgcttggtcgctggttcaagtccagcaggggccaccagatatagcaaaggctgacgagaaatcgtcagcctttttctttttatatatcagttactttgcgtgccagtaagccgctgcacgtacccgctgtgggtcatactgttccgcttcaaagcggcggcttaaattcttaacgactttaccttcgccggttatccagatgaagtaatcatcggcagggatttgcatctgcgccagacgcgcatctaccgcctgctcatcatgtgccagccattcgatattaaaaccatcaaggtgcgcgagataatcctgacaggcgttatcccgcacgctaaccagcgcactaacttgcggtttaacggcaagtttgctcaacgtttccaggcggcggcgcaatgcaggcattccggattcatcgcagacatacagctgatacgcgtaatcttccggcaccaccaggctaccgcgcggacctgccaccgtaagtttatcgcccggttgcgcctgcatcgcccagccgctggcgaccccaccgtcgtgaataaagaaatcaatcgccagttcatggcgtagttcgtcatacagcggcgtatagtcacggctcggtgggcgtggtccttccggccagacgatgccctcttccgttaccgttggcggcacaaagtgagcgtcaggttgaggaaagaagagtttgctgtgatcgtcaaagccacggcttgtaaaaccgtccagcgcctcgccgccgaggacaatgcgctgaaaaccggcgctgatgcgctcaacgcgtaacacagtcagttcacggaagcgcagatcattgcgaacgcgctgcgggtagcggggggtgttattcattgttatcgccttcgtgatggtaatcagatatatctaaataaaactcgcaaatgataatgattgttaatcatgataaatgcaagcgatttgtagaactgatatgtctatagtctgataagacgaaccgcctcttctcaggcatcattactcaacgccggatgcggcgtgaacgccttatccggcctacgtgtgagatgagtccacgtttaaaaatcatttttacacttgcaagaacgctcatatcagatataaattagatatatctaattaagcaaaaggaggctgatatgagccatcatcacgaagggtgttgtaaacatgaaggccagccacgccatgagggctgctgcaaaggtgagaagagtgaacacgagcactgcggacacggtcaccagcatgaacacggtcaatgctgcggtggtcgccacggtcgcggcggcggtcgtcggcaacgtttctttggtcacggtgaattacgtctggtgattctggatattctcagccgcgatgacagccacggttacgaattgattaaagcgattgagaatctaacccaggggaattacaccccaagcccgggcgtcatctacccaacgctggattttctgcaggagcagagcctgattaccatccgcgaagaggaaggaggtaagaagcagattgcgctgaccgaacaaggcgcgcagtggctggaagaaaaccgcgaacaggtggagatgattgaagaacgcatcaaagcgcgttgcgttggcgcggcgctgcgccagaacccgcaaatgaagcgggcgctggataattttaaagcggtgctggatttacgcgtcaaccagagcgatatcagtgatgcacaaataaaaaagatcattgcggtgatcgaccgcgccgcttttgatattacgcaactggattaatcgccgcatccgccagtggcgcggtgcaattgccggatgcgacgcttgacgcgccttatccggcctacacccgctacacaccccgcaggcctgataagatgcgccagcatcgcatcaggcattgtgctccaaccgccggatccggcataccgattaatgcagtaccgtcaccgcgtcttccagtcggctggcgcggtgtttcaccatcgcgctcacctgcgcactctcttccaccagctcggcatttttctgggtgatcaggttaagctcatccactgcacgggtcaggctggaaagcccatcggcctgttccagcgtactatggctaatctgggcgatcaactgggtgacgtttttcacctgtgccacaatatcttccatcgtccgtccggcggcgtgtacctgctggctaccggattgcaccttatcagcactggcatcaatcagcttgcgaatatcgttggcagcattagcgctgcggctggctaaatgacgcacttcccctgccaccactgcaaaacctttgccctgttcgccggcacgcgccgcttccaccgccgcattcagggccagaatattggtctgaaacgcaatatcgttaatcaggctagtaatggtgccaatgcgctgggtactgtcggcgatatcgtccattgtcttgatcaccgtggtcatcgcctccccaccctgcactgccgcattactggcagtgatactcagtttatcggcagcgctcgccgtggcagagttctgtttcacgctcgccgccatttggttcatggtcgccaccgtttgctgaacgttatcaactgtctgctgggtatgttcgttcagttcatcggtgcctttcgccagcgtctcactgccatttctgacactggacacctggctactgacatcgttaattagccaacggcacatcaggccaagttgccctaccgcacgtaatgtcagccccagctcatcgctgcgattcagatgctcaacactattacgttctccggtcgccaccttcagtgcctgatgggcaacattttctatcgggcgcacaatctgccattcaaaacaggcgcttgccaacaataccactaacgcacagaggatatacgtcaccaccggggcagcaacaaaccaaagcatggccgccagcaagataaacatcagggtcatcactccacgcgcccgccagcgaagcggtaaactaggcagtttacccagccagcctttacgcaccaccaggcctttatgaatacgcttactggtacgtccggcgttcaacgctttgtacagcggctccaccgccgcgatctcttcatccgtcgcccgggtacgaatgctcatatagccactgatttttccctcgcgcaccatcggtaccgcattggcccgcacccaataatggtcaccatttttgcggcgatttttcacgatgccgctccagggctccccttttttcagggtgaaccacatatccgcaaacgccgcttttggcatatccgggtgacgcaccatgttgtgcggctgcccttgtaactcttgcaaggtatagccgctcacctgcacaaaagtgtcattagcatgagtgatatagctttgcagatcggtagtggacatcagagtggtatcgtccgccagcggggtattttgctgggtgacatacggatgagaagacatgttcgcgtcctgtgcaggttatatggttgttaacttcttgtcagagtttatgtcggccccgctgcggttatctttaaccgattaatttgatttagatcgcaatttgcgatttaaacacaaatctaattccttgatttaaaatactttcactctgttactatacgaaaacgttaattatcttgcccaaaaatcaggcaattattgccctgaaaacgtgcatttgcgcagcaatcatcaaatccatacccgacaaaaaccgtgcaaaataacaacaaatgttaacagatagcattaaatattgcacaaatgataaccgaatttgtgtttatcccgattttcgcgatcgcagccggagtggcgcaatccctgcaatacttaaatcggtatcatgtgatacgcgagcctccggagcatattttgaacaggttacctagcagcgcaagcgctttagcgtgcagcgcccacgccctgaatctcattgagaagcgaacgctggatcatgaggagatgaaagcacttaaccgagaggtgattgaatacttcaaagagcatgtcaatccggggtttttagagtatcgcaaatctgttaccgccggcggggattacggagccgtagagtggcaagcgggaagtttaaatacgcttgtcgacacccagggccaggagtttatcgactgcctgggaggttttggaattttcaacgtggggcaccgtaatccagttgtggtttccgccgtacagaatcaacttgcgaaacaaccgctgcacagccaggagctgctcgatccgttacgggcgatgttggcgaaaacccttgctgcgctaacgcccggtaaactgaaatacagcttcttctgtaatagcggcaccgagtccgttgaagcagcgctgaagctggcgaaagcttaccagagtccgcgcggcaagtttacttttattgccaccagcggcgcgttccacggtaaaagtcttggcgcgctgagcgccacggcgaaaagcaccttccgcaaaccgtttatgccgttactgccgggcttccgtcatgtgccgtttggcaatatcgaagccatgcgcacggctcttaacgagtgcaaaaaaaccggtgatgatgtggctgcggtgatcctcgaaccgattcagggtgaaggtggcgtaattctgccgccgccgggctatctcaccgccgtacgtaagctatgcgatgagttcggcgcactgatgatcctcgatgaagtacaaacgggcatggggcgcacgggcaagatgttcgcctgcgagcatgagaacgtacagccggatatcctctgccttgccaaagcgctcggcggcggcgtgatgccgattggcgcgaccatcgccactgaagaggtgtttagtgttctgttcgacaacccattcctgcataccaccacctttggcggcaacccgctggcctgtgcggcggcgctggcgaccatcaatgtgttgctggagcagaacttaccggctcaggctgagcaaaaaggcgatatgttgctggacggtttccgtcaactggcgcgggaatatcccgatctggtacaggaagcgcgtggtaaagggatgttgatggcgattgagtttgttgataacgaaatcggctataactttgccagcgagatgttccgccagcgcgtactggtggccggaacgctcaataacgccaaaacgatccgcattgaaccgccactgacactgaccattgaacagtgtgaactggtgatcaaagcggcgcgtaaggcgctggcggccatgcgagtaagtgtcgaagaagcgtaatatcaaatcggatggcgatacgacgtcgccatccgatctttttatacgacgcgtacgcccgcaggcatcatccgctccggcgttaacagcacgctttcactgccgtcatcggtttccgcacacaacagcatgcattcgctcgtttcaccacgcattttcgctttttgcagattgcataagaccaccaccgttttccccatcagctcttcttcgctgtagtacggcaccaggctggtcacggtttgcagcgttttttgccccacatcaacctgtacgatgtacagcttgtcggcgttttcatggcgtttcacttccacaatctttccgacgcgcatttccagacgtgcaaaatcagcgtaagccacggtttccattgcttcctcccttagggtaaaattttactaaactatagcaaaagtttttctcaatcctgtaggctaaaaatggagaatgcaggcgtgatcacattcgtgagccgctgtgttaccgttacagcgtcaaagaaacgcgctttatttactgaaaacaggtgacccgataagcacttcctctacaatgggggcgcacatcagggaaagtaaaaaaggtaaacatggcaacactaaaagacatcgcaatcgaagctggcgtatccctggcgacagtatccagggtcttaaatgacgatccgacattgaatgtgaaagaagagacgaaacatcgcattctcgagatcgccgaaaagctggagtacaagaccagtagtgcccgtaaactccagacaggtgcagtcaaccaacaccatattctggctatctacagctaccagcaggagctggagatcaacgatccttactatctggcgatccgccacggcattgaaacccagtgcgaaaagctgggcatcgagctcaccaactgttatgaacacagcggcttaccagacattaaaaacgtcaccggtattttaattgtcggcaaacccacgcccgccctgcgcgccgctgccagcgcgttgaccgacaatatctgttttatcgactttcacgaacccggcagcggttacgatgcggtggatatcgatctggcacgcatcagtaaagaaatcatcgacttctatatcaaccagggcgttaatcgtattggttttattggcggtgaagatgagcctggcaaggcggatattcgtgaggtcgcctttgcggaatatggccgactgaaacaagtggtacgcgaagaggatatctggcgcggcggtttttccagtagcagcggttatgaactggcaaaacaaatgctggcgcgggaagactatccgaaggcactgtttgttgcttccgattccattgctatcggcgtactgcgggcaattcatgaacgaggcctgaacatcccacaggatattagccttatcagcgttaacgatatccccaccgcgcgatttacctttccgccgctctccaccgtgcgcatccattccgagatgatgggaagtcagggcgttaacctggtgtatgaaaaagcccgcgatggtcgcgcgctgccgctgttagtcttcgttcccagcaaattaaaactgcgcggcacgacccgttaaatccccttacacactgtccggcaatcgtttttgccggacagtgctgccgtttattttcgtgatccagttaaagtaaatgcatttacctgctactttttagtaaaaattttactaaactccccagcaattacacaaactaccatcaccatgaatggttccgatttctctctaccgggaggccctatgaatcgctgggaaaacattcagctcacccacgaaaaccgacttgcgccgcgtgcgtacttttttagttatgattctgttgcgcaagcgcgtacctttgcccgcgaaaccagcagcctgtttctgcccttaagcggtcagtggaatttccacttttttgaccatccgctgcaagtaccagaagccttcacctctgagttaatggctgactgggggcatattaccgtccccgccatgtggcaaatggaaggtcacggcaaactgcaatataccgacgaaggttttccgttccccatcgatgtgccgtttgtccccagcgataacccaaccggtgcctatcaacgtattttcaccctcagcgacggctggcagggtaaacagacgctgattaaatttgacggcgtcgaaacctattttgaagtctatgttaacggtcagtatgtgggtttcagcaagggcagtcgcctgaccgcagagtttgacatcagcgcgatggttaaaaccggcgacaacctgttgtgtgtgcgcgtgatgcagtgggcggactctacctacgtggaagaccaggatatgtggtggagtgcggggatcttccgcgatgtttatctggtcggaaaacacctaacgcatattaacgatttcactgtgcgtaccgactttgacgaagcctattgcgatgccacgctttcctgcgaagtggtgctggaaaatctcgccgcctcccctgtcgtcacgacgctggaatataccctgtttgatggcgaacgcgtggtgcacagcagcgccattgatcatttggcaattgaaaaactgaccagcgccagctttgcttttactgtcgaacagccgcagcaatggagtgcagaatccccttatctttaccatctggtcatgacgctgaaagacgccaacggcaacgttctggaagtggtgccacaacgcgttggcttccgtgatatcaaagtgcgcgacggtctgttctggatcaataaccgttatgtgatgctgcacggcgtcaaccgtcacgacaacgatcatcgcaaaggccgcgccgttggaatggatcgcgtcgagaaagatctccagttgatgaagcagcacaatatcaactccgtgcgtaccgctcactacccgaacgatccgcgtttttacgaactgtgtgatatctacggcctgtttgtgatggcggaaaccgacgtcgaaagccacggctttgctaatgtcggcgatattagccgtattaccgacgatccgcagtgggaaaaagtctacgtcgagcgcattgttcgccatatccacgcgcagaaaaaccatccgagcatcatcatctggagcctgggcaatgaatccggctatggctgtaacatccgcgcgatgtaccatgcggcgaaagcgctggatgacacgcgactggtgcattacgaagaagatcgcgatgctgaagtggtcgatattatttccaccatgtacacccgcgtgccgctgatgaatgagtttggtgaatacccgcatccgaagccgcgcatcatctgtgaatatgctcatgcgatggggaacggaccgggcgggctgacggagtaccagaacgtcttctataagcacgattgcattcagggtcattatgtctgggagtggtgcgaccacgggatccaggcacaggacgaccacggcaatgtctggtataaattcggcggcgactacggcgactatcccaacaactataacttctgtcttgatggtttgatctattccgatcagacgccgggaccgggcctgaaagagtacaaacaggttatcgcgccggtaaaaatccacgcgcgggatctgactcgcggcgagttgaaagtcgaaaataaactgtggtttaccacgcttgatgactacaccctgcacgcagaggtgcgcgccgaaggtgaaacgctcgcgacgcagcagattaaactgcgcgacgttgcgccgaacagcgaagcccccttgcagatcacgctgccgcagctggacgcccgcgaagcgttcctcaacattacggtgaccaaagattcccgcacccgctacagcgaagccggacaccctatcgccacttatcagttcccgctgaaggaaaacaccgcgcagccagtgcctttcgcaccaaataatgcgcgtccgctgacgctggaagacgatcgtttgagctgcaccgttcgcggctacaacttcgcgatcaccttcagtaaaatgagtggcaaaccgacatcctggcaggtgaatggcgaaagcctgctgactcgcgagccaaagatcaacttcttcaagccgatgatcgacaaccacaagcaggagtacgaagggctgtggcaaccgaatcatttgcagatcatgcaggaacatctgcgcgactttgccgtagaacagagcgatggtgaagtgctgatcatcagccgcacagttattgccccgccggtgtttgacttcgggatgcgctgcacctacatctggcgcatcgctgccgatggccaggttaacgtggcgctttccggcgagcgttacggcgactatccgcacatcattccgtgcatcggtttcaccatgggaattaacggcgaatacgatcaggtggcgtattacggtcgtggaccgggcgaaaactacgccgacagccagcaggctaacatcatcgatatctggcgcagcaccgtcgatgccatgttcgagaactatcccttcccgcagaacaacggtaaccgtcagcatgtccgctggacggcactgactaaccgccacggtaacggtctgctggtggttccgcagcgcccaattaacttcagcgcctggcactatacccaggaaaacatccacgctgcccagcactgtaacgagctgcagcgcagtgatgacatcaccctgaacctcgatcaccagctgcttggcctcggctccaactcctggggcagcgaggtgctggactcctggcgcgtctggttccgtgacttcagctacggctttacgttgctgccggtttctggcggagaagctaccgcgcaaagcctggcgagctatgagttcggcgcagggttcttttccacgaatttgcacagcgagaataagcaatgaggatcatcgataacttagaacagttccgccagatttacgcctctggcaagaagtggcaacgctgcgttgaagcgattgaaaatatcgacaacattcagcctggcgtcgcccactccatcggtgacagtttgacttaccgcgtggagacagactccgcgaccgatgcgctatttaccgggcatcgacgctattttgaagtgcattactacctgcaagggcagcaaaaaattgaatatgcgccgaaagagacattacaggtagtggaatattatcgtgatgaaactgaccgtgaatatttaaaaggctgcggagaaaccgttgaggtccacgaagggcaaatcgttatttgcgatatccatgaagcgtatcggtttatctgcaataacgcggtcaaaaaagtggttctcaaagtcaccatcgaagatggttatttccataacaaataacaactacggcggcaaaaggagtttgccgccaccgctaccctactcattttcggagatgtgttatgtctgataccaaacgtaatacaatcggcaaattcggcttgctcagcctgacttttgccgccgtttacagctttaacaacgttatcaataataatattgagcttggactggccagcgcaccgatgtttttcctcgcgacgattttttattttattcccttctgtctgatcatcgcagaatttgttagcttaaataaaaacagtgaagccggtgtctacgcgtgggtaaaaagtagcctgggcggacgttgggcatttattactgcctatacctactggttcgtaaacctgttctttttcaccagtctgttgccgcgcgttattgcttatgctagctatgccttcctcggatacgaatatattatgacgccggttgccaccaccattatcagtatggtgctgttcgccttctccacctgggtttccaccaacggggcgaaaatgttggggccaattacctccgtcactagtacgctgatgctgctgttaacgctctcctacattttactggcaggtacggcgctggttggcggcgtacagcctgctgacgccatcaccgttgacgcgatgatcccgaacttcaactgggcgttcctcggcgttaccacctggatctttatggccgcaggtggcgcggagtccgtcgctgtgtacgttaacgacgtcaaaggcggtagcaaaagcttcgttaaagtgatcatcctcgccgggatttttatcggcgtactgtattccgtctccagcgtgctgattaacgtcttcgtcagcagcaaagagttgaaatttaccggcggaagcgtgcaggtattccacggcatggcggcgtattttggtctaccggaagcgttgatgaatcgctttgtcggtctggtgtcctttaccgcgatgttcggttccctgctgatgtggaccgcaacgccggtgaaaattttcttctccgaaatcccggaaggcatctttggtaagaaaaccgtcgaactgaacgaaaacggcgttccggcgcgcgcagcgtggatccagttcctgatcgtcatcccgctgatgattatcccgatgctcggttccaataccgtgcaggatctgatgaatactattattaatatgaccgccgcagcgtccatgcttccgccgttattcatcatgctggcttacctgaatttacgcgccaaattagatcacctgccacgcgatttccgtatgggctcccgccgcaccggtattatcgttgttagtatgctgattgcgatatttgccgtagggtttgtcgctagcacattcccgactggcgcgaatattctgaccatcattttttataacgtcggcggtattgttatcttccttggctttgcgtggtggaaatacagtaaatatataaagggattaacggctgaagagcgccatattgaagcgacgccagccagcaatgttgattaagcagaataataaaaaatgagcaggcattttccctcttcctggatgaggagagggaaaatagtttctgcctttatatttttataattacaacgataaaaggctgtactttttctttagctcatggattaacacaatgaaattaatcactgcaccatgcagagcattacttgctctgccgttttgctacgccttttctgcggcaggagaagaagcacgtccggcagaacatgacgacacaaaaacacccgcaattaccagcacatcttctcctagttttcgtttttacggcgaattaggggttggtggatatatggatttagagggtgagaataaacataaatacagcgacggtacctatattgaaggtggcctggagatgaagtacggctcctggttcggcctgatttacggcgaaggctggaccgtgcaggccgaccacgacggcaatgcctgggtgccagaccatagctggggtggtttcgagggcggaattaaccgtttctatggcggttatcgtaccaatgatggcaccgaaatcatgctcagtctgcgtcaggattccagcctggatgacctgcaatggtggggcgatttcacccccgatctgggctacgtcattcccaatacccgcgacattatgactgcgctgaaggtacagaacttaagcggcaactttcgttatagcgtcaccgcgactcctgccggacatcatgatgaaagcaaagcctggctacattttggcaaatacgatcgctatgacgacaaatacacctatccggcaatgatgaacggttacatccagtatgaccttgccgaaggcatcacctggatgaacggtctggaaatcaccgacggcacaggacagctctatctcacgggcctgctaactcctaactttgccgctcgcgcctggcaccataccggacgcgccgacgggctggacgtaccgggaagtgaaagtgggatgatggtgagcgccatgtatgaagcgttaaagggcgtttatctctccaccgcttacacctacgccaaacatcgccctgaccacgctgacgatgaaaccacctctttcatgcagtttggtatctggtacgaatacggcggcggacgtttcgccacggcttttgatagccgcttctacatgaaaaatgcctctcacgatcccagcgaccaaatcttcctgatgcaatatttctactggtaataaggactgtaatttcatgaaaataaaaactattttaacgccagtaacctgcgctctgctgataagtttttccgcccatgccgctaacgccgacaattataaaaacgtgattaaccgtactggcgcgccgcagtacatgaaggattacgattacgacgatcaccagcgttttaatccgtttttcgatctcggagcctggcatggtcatctgttgccagacggccctaacaccatgggcggctttccgggcgttgcgctgctgacggaagagtacatcaactttatggccagcaatttcgaccgcctgaccgtctggcaggacggcaagaaagtcgactttacgctggaggcatacagtattcccggtgcgctggtgcaaaaactgacagcaaaagatgtgcaagtcgaaatgactctgcgcttcgccacgccgcgcacgagtctactggaaaccaaaatcaccagcaataaaccgctggatctggtgtgggacggcgaactgctggaaaaactggaagcgaaagaagggaaaccgctttccgataaaaccattgctggcgaataccctgactatcagcgcaaaatcagcgccacccgtgatggcctgaaagtcacctttggcaaagtgcgcgccacctgggatctgctgacctccggcgaaagcgaatatcaggtgcataaatccctgccggtgcagactgaaatcaacggtaatcgctttaccagtaaggcgcatatcaacggtagcaccacgctctacaccacctattcccatctgctgaccgctcaggaagttagcaaagagcaaatgcagatccgcgatattctggcgcgtccggcgttttatctcaccgccagccagcaacgctgggaagaatacctgaagaaagggttaaccaatccggatgcgacgccggaacagacgcgcgtcgcggtgaaagcgatcgaaacgctcaacggtaactggcgcagtccgggcggtgcggtgaaatttaacaccgttacaccgagcgtgaccgggcgctggttctccggcaatcagacctggccgtgggatacctggaagcaggcgtttgcgatggcgcatttcaatccggacatcgccaaagagaatatccgcgcggtcttctcctggcagatccagcctggcgatagcgtgcgtccgcaggatgtgggctttgtccccgacctgatagcgtggaaccttagccccgagcgtggtggcgatggcggcaactggaacgaacgtaataccaaacccagccttgccgcctggagcgtgatggaagtgtataacgtcacccaagataaaacctgggtggcagagatgtacccgaaactggtggcctatcacgactggtggttacgtaaccgcgatcacaacggcaacggcgtgccggaatatggcgcgacccgcgacaaagcccacaacactgagagcggcgagatgctgtttacggtgaaaaaaggcgataaagaagagacgcagtctgggctgaacaactacgcccgcgtggtggagaaaggccagtacgacagtctggaaattccggcacaggttgctgcaagctgggaaagcgggcgtgatgatgccgccgtctttgggtttatcgacaaagaacagttggataaatatgtcgctaatggcggcaaacgtagcgactggacggtgaaattcgccgaaaaccgcagtcaggacggaacgttgctgggctacagcctattgcaggagagcgtggatcaggccagctatatgtacagcgataaccattatctggcggagatggcaaccatcctcggtaagccagaagaggccaaacgctatcgccagttggcacagcagctcgcggactacatcaacacctgtatgttcgacccgactacccagttctactatgacgtacgtattgaagataaaccactggcgaacggctgcgcgggcaaaccgattgttgagcgcggtaaagggccggaaggctggagcccgctgtttaacggtgcggcaacgcaggccaatgccgacgcggtggtgaaggtgatgctcgatcctaaagagttcaacacctttgtcccgctgggaacggcggcgttaaccaatccggcttttggcgctgatatctactggcgtgggcgcgtatgggtggatcagttctggtttggtctgaaagggatggagcgttacggttatcgtgatgatgccctgaagctggcggatacgttcttccggcacgccaaagggttaaccgccgatggaccaattcaggaaaattacaacccgctgacaggcgcacagcaaggcgcaccaaatttctcctggagtgccgcgcatttgtatatgttgtataacgattttttccgtaagcaataatttgcaactgctggcggatgcggcgtaaacgccttatccgccctacatgtgcaatcctcctggccggataaaacgcggcaagcgttgcatccggcaactgcaccgcgccactggcggatgcggcgtgaacgccttatccgccctacatgtgtgttcccgtaggtcggataagacgcgacaagcgtcgcatccggcatctgcaccgcgccactggcggatgcggcgtggacgccttatccgccctacatgtgcaattccgtaacctggataaaacgcgacaagcgtcgcatccggcgttatcaccgggcgtattctttttgaatcccatcacaaaccccgcactccccttttcccttttctccggcgacggctaaattagaactcatccgaccacataacaattattttacatactggacaattttatgagctacccgagcctgttcgccccgctggatttaggttttaccacgttaaaaaaccgcgtgttgatgggcagtatgcacaccgggctggaggaatacccggacggtgccgagcggctggcagcgttttatgccgaacgcgcccgtcacggcgtggcgctgattgtcagcggcggcattgcaccagatttaacaggcgttggcatggaaggtggcgcaatgctcaacgacgccagccagatcccacaccatcgcaccattaccgaagcggtacatcaggaaggcggcaaaatagccctgcaaattttgcataccgggcgctacagctaccaaccgcatctggtcgccccgtccgcattgcaggcccccatcaaccgtttcgtgccccatgagttaagccatgaagagatcctgcaactgatcgacaatttcgcccgctgcgcgcaactggcgcgggaggcaggatacgacggtgtagaggtgatgggttccgaagggtatttgatcaacgaatttctgacgctgcgcaccaatcagcgtagtgaccagtggggcggcgattaccgcaaccggatgcgatttgccgtagaagtagtgcgtgcggtgcgcgaacgcgtcggcaacgacttcattattatctaccgactgagcatgctcgacctggtcgaagacggcgggacttttgccgaaacggtagagctggcgcaggccattgaagcggcgggcgcgaccattatcaacaccggcattggctggcatgaagcacgtattccgaccattgccacgcccgtgccgcgcggcgcatttagctgggtcacgcgcaaactgaaaggccacgtcagcctgccgctggtaaccaccaaccggattaacgatccgcaggttgccgacgatattctcagccgcggcgatgccgatatggtaagcatggcgcgaccgtttcttgctgatgcggagctgctgagtaaagcgcaaagcggacgagccgatgagatcaacacttgtattggctgcaatcaggcctgtctcgatcaaatcttcgttggcaaagtcaccagctgcctggtgaatcctcgcgcctgccacgaaaccaaaatgccaatccttcccgccgtgcagaaaaaaaatctggcggtggtcggtgcgggacctgctgggctggcgtttgccattaacgcggcggcgcgtgggcatcaggtaacattgtttgacgctcatagcgagattggcgggcagtttaatatcgccaaacagatccccggcaaagaggagttttacgaaacgctgcgctattaccgccggatgatcgaagtgacgggcgtgacgctaaaactcaatcacaccgtgacggcggatcagttacaggctttcgatgaaacgatcctcgccagtgggatcgtgccgcgcactccgcccatcgacgggatcgatcatccgaaggtattgagttatctcgatgtactgcgcgacaaagcgccggttggcaacaaagttgccatcatcggttgtggcgggattggttttgatacggcgatgtatttaagtcagccgggcgaatccaccagccagaatatcgccgggttctgtaatgaatgggggatcgacagtagcctacaacaggctggtggcttaagcccgcagggaatgcagatcccccgtagcccacggcagattgtgatgctccagcgcaaagccagcaaaccaggacaggggttaggcaaaaccaccggctggatccatcgcaccaccctgctcagccggggtgtgaaaatgatcccaggcgtaagttatcagaagattgacgatgacgggctgcatgtggtgatcaacggcgaaacgcaggtattagcagtggacaatgtggtgatctgcgcagggcaagagccaaaccgcgcgctggcgcaaccgctgattgatagcgggaaaacggtgcatttaattggcggctgcgatgtggctatggagctggacgcacgacgggcaattgcccagggaacacggctggcgctggagatttaaatcgttatttgaagcgccggatgcaacgcatccggcacgtcgcgttaatcaataaacaaggcgggagaaatgccgaatcgcgttgccaattttttagcgtgttccagcgttaatttcctcttcccgctcaaaacgcgactcaccatagatttactgccaatttccggcagatcggaaagggttaaaccatattgatccataagggtacgaatcacggctataccgccaggcatggcttgagccatggcattaaattccgcaaattcgggcgcactttcttcccacgcggttattttggcacacaccagatccagcaaggggttttcaggatcgttgagcagcagatgatctaccagttccagcgcctgggtgtattgttcctcgttctgaatacccgccagaaaaggtgccacagcagttagcttttctcctgcttgcaagatgtcggcaatcgcaatcattttttccccttagtacgatgaacagcggtaaagaaatcgtattctttatgcgtcataacttcacgtatgtagcacttttggctttcaaaaaagaccattgctacaacacgtaattcattgcccccaacattgaaaacataatgcttatccagatatttgaagttatccagagatgggaatactgcttttaaactctcaggttttttgaaatatcccttagcaatcgtgttccccagagccaccaactccgttttatgttgcgggtatttttccgcagcatctttcaatgctttttgagttatcaggtgcattcttcatcacgtccgttgacaaattggcaatatgataacatccgttgccagattggcaacggatgaatttatctgtgtgacggaagaataaacgtagaaaaacgctaaacaagagaatgtagacgatggtgacagggattttttgttttatggaagcgcgattccagaactgggcagacattgccggatgcgacgcttgccgcgtcttatccggcctggagtaacgtgctgaacgtaggccggataaggcgtttacgccgcatccggcaggtaactcccaatcttaccgacgacgtcccagcttcaccgctttcagtaccacaaatttattattcgtcgcaatagtggtgcagttgccgaaaatcttcttcagtttatggaagtaatccaggtgacggttggcaacgatatacagctcgccgttgattttcaggcagcggcgggcgtggtggaacatctcccaggcgacgttatcggtcagcgcatgttgttggtgaaacggcgggttgcagagcacagcattaaagcggaaaggctccacgccggagagcgcgttgttgatcataaactcgcagcgatccaacgcctctggcatgttggtttcaacgttcaaacggctggaagcaaccgccatcgggctttcatcgacaaacaccactttcgcctgcgggtttttatcaagcagcgtcagaccaataacgccattaccgcaaccgagatcgacaatctccccttcgagattctctggcagatgttgcataaagaagcgcgcgccgatatcaagcccggtgcgggagaagacattcgcatggttgtggatagtccagtcagtaccttccagcttccagctaacggtctgcggcgcatcggccagctgcggttcattgaaagtgcaattaatcaggcgcgcttttttccatgccagcgtggtggtggttgggccgagcactttttcgaacagttccagcgtggaagtgtgaatgtcacgggccttggcaccggcaataatacgtgtatcgctcgtgaccactttgcgcagcgcacgcagttgctgttccagcaatgccagtgttttcggcactttgatcagcaccacacccggctgttgcgggtagtcggcggtgctgtcgagaaacttcacgctgctctcatcaatcccgttgaggcgtaaattctcgcgcgtcgccagttcactgatgtaactgtcgccaatgctgtacggcttatgttccgccagtgcgcagcttaacgcaccaaaggcatcattcaggatcaacaccgggccgcggatttctgtgtcgtccaactgttgcagcaaatattcatccgccgcttcccacgcctgtagcgggttaacgtcatccgtcgccggaaaacgttgtagtgtcagactacggaaaccgttgtctaagtggctcatcggccctcctgaatgataaaatttcgacattgcccctgaaaagggtgcgtgagtataccctttttctctttttcgtgggcggttatgagcaatcttacttatcttcagggttatcccgagcagctactttcccaggtgcgaacactgattaacgaacagcgtctgggcgatgtgctggcaaaacgctatccgggaacacacgactacgccaccgataaagccctctggcaatatactcaggatctgaaaaatcagtttctgcgtaatgccccgccgatcaataaagtgatgtatgacaataagatccatgtgctaaaaaacgcgctcgggttacataccgctgtttctcgtgtgcagggcggcaagctgaaagcaaaggtggagatccgcgtcgctaccgtgtttcgcaacgcgccggaaccgtttttgcgcatgatcgtggtgcacgagctggcgcacctgaaggagaaagagcataacaaagcgttttaccagttgtgttgtcatatggaaccccagtaccaccagcttgagttcgacacccgactgtggctaacgcagttgagccttgggcagaacaaaatctgaaaatgatgtcaggcgttatcttttctttctttagcgcctaaaatcgacctcccccctttcgttaaggataacgaccatgctgcgcgcatttgcccgccttcttctccgtatttgtttttctcgccggactctaaagattgcctgcttactgttacttgtggcaggagcgaccatccttatcgccgatcgcgtaatggtcaacgccagcaaacagctgacctggagcgatgtcaacgccgttccggcgcgtaacgtgggtttattgctgggggcgaggccgggtaatcgctactttacccgacgtattgataccgcagcagcgttgtaccacgccggaaaagtgaaatggctgctggtaagtggcgataacggacgtaaaaattacgatgaagcaagtggtatgcagcaggctttgatcgctaaaggcgtaccagcaaaagtgatcttctgcgactatgccggattcagtacgctggatagcgtagtgcgtgccaaaaaggtttttggtgaaaaccatatcaccattatcagccaagaatttcataatcaacgcgccatctggctggcaaaacagtacggcatcgacgctatcggttttaacgcgccagacctcaatatgaagcacggtttttatactcaactgcgggagaaactcgctcgtgtcagcgccgtgattgacgccaaaatcctccatcgccagccgaaatatctcgggcctagcgtcatgattgggccgtttagtgagcatggctgtccggcgcagaaataatgcgtatctgcgcacgtcgaagatgaaaaaggcgtgctacattgacgacagaatccctttatggagtatccacgcgttatgatacgtttcgctgtgattggtacgaactggatcactcgccagttcgtcgaggccgcccatgagagcggtaaatacaagttaaccgccgtatattcccgcagccttgaacaggcccagcacttcgccaatgatttttctgtcgagcatctgtttaccagcctggaagcgatggcggaaagcgatgccattgacgcggtgtatattgccagcccgaattccctgcatttttcccagacacaacttttccttagccataaaattaatgtgatttgcgagaaaccgctggcgagcaatctggcggaagtggatgccgccattgcctgtgcgcgggaaaatcaggtggtgctgtttgaggcatttaaaaccgcctgcctgccgaactttcatttgttgcgccaggcgctgccgaaagtcggcaaactgcggaaagtctttttcaactattgccagtattccagccggtatcaacgttacctggatggtgagaatcccaacacctttaatccggcattctctaacggtagtattatggatatcggtttttactgtctggcgagcgcggtggcgttatttggtgagccgaaaagcgtgcaggcaaccgccagtttgctggcaagcggcgttgacgcccagggcgtggtggtgatggattacggtgatttcagcgtcaccttgcagcacagtaaagtcagtgattctgtcctggcgagcgagattcagggcgaagcaggaagcctggtgattgaaaaactgtctgaatgccagaaagtgtgcttcgtgccgcgtggcagccaaatgcaggatctcacccagccgcagcatattaataccatgctctacgaagcagagctgttcgctaccctggtggatgagcatctggtggatcatccagggctggcggtcagtcgcatcaccgccaaactgctgaccgagatccgccgccagactggggtgatttttccggcagatagcgtaaaactataattgccaaagtaaaacagtgtaaaaggtatgtaacagaccattgactggctgaatggtctgtcatactttgttacctgcaaaggggagtaacttcattgccggtcgatcgtcattacgatgtgtgaaaaaacacatccggtcaccgggcaacccgaaaggaatacgcagacgtattccttttttgttgtaagtgagaccttgccggaaggcgaggtctatgcataaaaagcagcggctgacgtcttccgacgttggccgtttttttatgtgtaaggaacttctatgaatactgtcggcacgccgttgctatggggcggattcgctgttgttgtcgccattatgctggctatcgacctgttgttgcaggggcgtcgtggggcacatgccatgaccatgaaacaggctgcggcctggagcctggtctgggtgacgctgagcttactgtttaacgccgctttctggtggtatctggtgcaaaccgaaggtcgcgccgttgccgatccacaggcactggcctttctcacaggttatctgattgagaaaagcctggcggtcgataacgtctttgtctggctgatgttgttcagctatttctctgttccggcggcattacaacgccgcgtgctggtgtatggcgtgctcggggcgattgttctgcgtaccatcatgatcttcactggcagctggctaattagccagttcgactggatcctgtatatcttcggtgccttcctgctgtttaccggcgtgaagatggcgctcgcccatgaagatgaaagtggcattggcgacaagccgctggtgcgctggctacgcggtcatttgcgcatgaccgacaccatcgacaacgagcatttctttgtgcgtaagaatggattgctgtacgccacaccgctgatgctggtactgattctggtggaattgagcgacgtgattttcgccgtggatagcattccggctatcttcgccgtgaccactgacccgttcattgtgctgaccagtaacctgtttgcgatcctcggcctgcgtgcgatgtatttcctgctggcgggcgtagcagagcgtttcagcatgctcaaatatggcctggcggtgattctggtgtttatcggtatcaagatgctgattgtcgacttctaccatattccaatcgccgtcagcctgggcgtggtgtttggcattctggtgatgacgtttattatcaacgcctgggtgaattatcggcatgataagcagcggggtggataatttttaatctgcctaagccgtgtaccctgtcattaacatgagcaccgttttctccctctcccttccagggagagggtcggggtgagggtaatttttcgcaccgatgctggcctgttcccctcaccctaaccctctccccaaacggggcgaggggactgaccgagtccttttttgatgttgtcatcagtctggaagccgcacgttggctttatttttatgtcaaagaaatgtaaccattaagtttcaaaatatgacctctctttaaaatccagcatttttcgcttcccgaagctgtaactttccttatactcgaccttgcaaacactttgttacatcctgaaagatgcgtcgacagaacgcaccagggatgtgcgacaacacaatgaaaggatcgaaaaatgactacgcaacgtagtccggggctattccggcgtctggctcatggcagcctggtaaaacaaatcctggtcggccttgttctggggattcttctggcatggatcagtaaacccgcggcggaagctgttggtctgttaggtactttgttcgtcggcgcactgaaagccgttgcccccatcctggtgttgatgctggtgatggcatctattgctaaccaccagcacgggcagaaaaccaatatccgccctattttgttcctctatctactgggcaccttctctgctgctctggccgcagtagtcttcagctttgccttcccttctaccctgcatttatccagtagcgcgggtgatattagcccgccgagtggcattgtcgaagtgatgcgcgggctggtaatgagcatggtttccaaccccatcgacgcgctgctgaaaggtaactacatcgggattctggtgtgggcgatcggcctcggcttcgcactgcgtcacggtaacgagaccaccaaaaacctggttaacgatatgagcaatgccgttacctttatggtgaaactggtcattcgcttcgcaccgattggtatttttgggctggtttcttctaccctggcaaccaccggtttctccacactgtggggctacgcgcaactgctggtcgtgctggttggctgtatgttactggtggcgctggtggttaacccattgctggtgtggtggaaaattcgtcgtaacccgttcccgctggtgctgctgtgcctgcgcgaaagcggtgtgtatgccttcttcacccgcagctctgcagcgaacattccggtgaatatggcgctgtgtgaaaagctgaatctggatcgcgatacctattccgtttctattccgctgggagccaccatcaatatggcgggcgcagcaatcactattaccgtgttgacgctggctgcggttaatacgctgggtattccggtcgatctgcccacggcgctgctgttgagcgtggtggcttctctgtgtgcctgtggcgcatccggcgtggcgggggggtctctgctgctgatcccactggcctgtaatatgttcggtattagcaacgatatcgccatgcaggtggttgccgtcggctttatcatcggcgtattgcaggactcttgcgaaaccgcgctgaactctagtactgacgtgctgttcactgcggcagcttgccaggcagaagacgatcgtctggcaaatagcgccctgcgtaattaattgtttaacccctttcgtctacggcggaaggggttttctcaactttaaacggatcaattccccttttctgcatccgccagaaacgaatgatattcaggccattcataagcagaaaactaccctcaatcatcgtgccgcctatgctccccgcccagaagttgtgaatcacccagcaacacgtactaaaccacattacgcagcgcatggtcagccctttacagcagaatagcgcccaggtactgacaatcgtgccgataaccggcaatagttcgacaggatgatggaacttcgcgaggccaattccgccagtcagcacaataaaaatcgccattacccataagctgcgcgtgcgtaaggtaatcaatgtacgaatggcattaaggatggcactggcaccagcgggataggtgcccagaagaaaaaaatgtacgccaataacggcgctatagacgctaagctgctttttgaagcgacgttcgtcacgattgaaaaatgttgtgataccaatcagaaaggcgatgacacccacgccctgggccagccaatacgcggtcatgataaatccttagcaggtatggaaaagcaaacggcgcttcacattatgaaacgccgttttttattaacaactcatttcgactttatagcgttacgccgcttttgaagatcgccagttcgcggaagtcgttacgctcgttacaggtttgcttaccgttggcaaactcaacgatggtgtcgataaattcttccagcaactgcggcatcgctttaccgtggatcaactgacccgcgtcaaagtcgatccagtgttttttcttcgccgccagttcactgttggtggcgattttcaccgtcggcacaaatccaccatacggcgtgccacgaccagtactgaacagcaccatatggcagcccgcacccgccagggcgctggtcgctacggcatcgttacccggcgcacttaacaagttcagccctggcgttttcagacgctcgccgtaacgcagcacgtcaaccacgacgctggaacccgctttctgggtacagccaagacttttgtcttccagcgtggtgataccgcccgctttgttccccgggcttgggttttcatagatcggctgatcatgggcaataaagtactgtttgaagtcgttgaccatggtgaccagtttttcaaacgttgcttcgtcgcggcaatggtccatcagcaactgctctgcgccaaacatctccggcacttcggtcagtacggtagtaccgccgttagcaatcacgtagtcagagaaacgccccagcatcgggttagcagtaataccagaaagaccgtcagaaccaccgcactccagaccaaacttcagttcgctgagtttgcctggctcgcgtttatcgttgcgcatcacgttatacagctgatgcaaatgctcgattccggcttcgatctcatcatcctgctgttggcagatcatgaaatgaacgcgttcaggatcgatatcgcccagcgtttcacggaatgcggcaacctggttgttttcacagcccagaccaatcaccagcactgcgcctgcgttcgggtggcgcaccatgttttgcagcatggtgcgggtattaatgtgatcgtcgcccagctgactgcagccgtaggtgtggctgaagaggaacacgccgtcagtaccttcggcgttgttggtctctttcagaaaacggttctggatctgccgcgcgatgccgttgacacagcccacggttggcaggatccacagctcattacgcaccccgacatcgccgttagcgcgacgatagatctgcacttcacgatctgccgcttgcgcaggcagatcctgaaaatcaggttgatagcgatactgatccagatcgctcagattcgtgcgcgtattgtgggcgtgaacgtgaacacctgccgcaatatccgccaatgcataaccaatcggcaggccatatttgatgacattggccccttttgcgatatccgttaacgcaaatttatgtccacgagcaacatcctggcgcagcgtaacagtctggttatcgacactgacttctgtgccttcagccaaatctgctaaagcgaccgcgacgttatccagcgcatggatcttgatgtattgcatatcaaccccagaccttagttcagttcaatggcgaagtagtcacgcgcattgttaaagcaaatatttttcaccatctcgcccagcaggttgatgtccgccggtgcttcgcccgcttccacccagcgaccgatcatctggcacagaatgcggcggaagtattcgtgacgggtgtaactcaggaagctacggctgtcagtcagcataccgacaaagcggctcagcagaccgagctgcgccagttgggtcatctgacgttccataccgtctttctgatcgttaaaccaccagccggaaccgaactgcattttgcccggcataccttcgccctggaagttaccgatcatggtgcccagcacttcgttatcgcgcgggttcaggcagtacagaatggttttcggcagcaggttttcttcattctgcttgctcagcaacttagacagctcttccgccatcggacggtcgttgatggagtcaaagcctacatccggccccagcagtttgaactgacgcaggttgttattacgcagcgcgccaatgtggtactgctgtacccagccgcgacgtgcatattcggcaccaaggaacaccagtaccgcagttttgaactgcgccacttcgtgctcgctcagggtttcgccagccagacggcgcgccagaatgctgtccagttccgcttcgttcgcttcagcaaacatcaccacatccagcgcgtggtcagacactttacagccgtgagcggcgaagtgatccagacgtttggtcagggcagtttgcaggtcagcaaagcggcgaatgtcggtatcggaaacttcgcccagcttcgccatgtagtcgttaaaggtcgcctgttcgatgttgaaggctttgtccggacgccagctcggcagcactttgatggtgaaagagccgtctttggcgatctctgcgtgatgctccagagaatcgatcgggtcatcggtggtgccgaccattttcacgttcatctgctgcatgatgccgcgcgcggagaagttatcctgcgccagcagttcgttacattcgttccagatttcatcggcagtactcggagaaagcaatttgccagtgataccaaacggacggcgcagttcgaggtgcgtccagtggtataacgggttgccgatagtgtgcggaacagtcgccgcccaggcgtcaaatttttcacggtcagacgcatcaccggtacacagacgctcggccacaccgttggtacgcatagcgcgccatttgtagtgatcgcctttcagccagatgtcatacaggtttttaaaacgatagtcttccgcaatctgctgcggcggcaaatggcaatggtaatcgaaaatcggctggtcttttgcgtagtcgtgatacagacggcgggcaaattcggtatctaacaggaaatcttcagtcataaacggagtcattttcgtcttcctctcaacgagtgagctagcttgcttatggtgcgatgctgacaaagttatcacaccaatttccagagtccgaagatattttcgtgagttagatcaataaacgtagttaaaaaaattactctcaaagtggtaaatctcgctgcaggccgcgccagtactggccttgctgtcgtcaggtaatgtccctacaaatattcccacatttgtgatggctctcaccttttaaagttgtatgacaagttatctttctgccgtcgcaaatcataagtcgacggaatgcaaattgccgattcattcatttgttagatgaatcgggttaaccggtacggaagccgaattagcacgaaactttcatggcaacgttcggggcgtgccggttttttttcggttacccggtcgtaactaacatcttcagcctctggcgggatgatggccgcgcttcctgcggatataacaaaacgatgaggttttacatgcgtaaaattaaagggttacgttggtatatgatcgcactggtgacgctcggcaccgtgcttggttacctgacgcgtaacactgtggcggcagctgcgccaactctgatggaagagttaaacatctccacccaacagtattcctatatcatcgcagcctattctgctgcttatacggtcatgcaaccggtagcaggttatgtactggatgtgctgggtacgaaaatcggttatgcaatgtttgctgtgctgtgggccgtgttctgtggtgcaaccgcgctggcaggtagctggggtggcctggctgttgctcgtggtgcggtcggtgccgcggaagcagcgatgatcccggcgggtctgaaagccagctccgaatggttcccggcgaaagagcgttccatcgcagtaggctactttaacgtaggttctagcattggtgcgatgattgcgccgccgctggtggtatgggcaatcgtaatgcacagctggcagatggcatttatcatctccggtgcattgagctttatctgggcgatggcatggctgattttctataaacatccgcgcgaccagaagcatctgaccgatgaagaacgcgactatattattaatggtcaggaagcccagcaccaggtgagcacggcgaagaaaatgtccgttggtcagatcctgcgtaaccgtcagttctggggtatcgcgctgccgcgtttcctggcagaaccggcctggggtacttttaacgcgtggatcccgctgttcatgtttaaagtttacggctttaacctgaaagagatcgcgatgttcgcctggatgccgatgctgtttgctgacctcggttgtatcctcggtggttacctgccgccgctgttccagcgttggtttggtgtgaacctgatcgtttcccgtaagatggtcgtaacgctgggtgcagtgctgatgattggcccgggtatgatcggcctgttcaccaacccgtatgtcgcaattatgctgctgtgtatcggtggttttgcccaccaggcactgtctggcgcgctgattacgctctcttccgatgtgtttggtcgtaacgaagtggcaacggcaaacggtttaaccgggatgtccgcatggctggcaagtacgctgtttgcgctggttgtcggtgcactggctgacaccatcggcttcagcccgctgttcgcagttctggcagtgttcgacctgttaggtgcgctggttatctggaccgtgttgcagaacaaaccggcgattgaggtggcgcaggaaacacataacgatcccgcaccgcaacattaacgtttcgtgtaagttttagtttcccttcaaagccgccttctcaggcggctttttcatcactgcgagtagagctaaactcgcaaaagtggtataacaaatatagtctgccgtatcatgcctggagcgcatatggaaatcactgaaccacgccgtttgtatcaacaacttgccgctgacctgaaagagcgcatcgaacagggcgtctatctggtgggtgataaactgcctgcagaacgctttattgccgatgaaaagaacgtcagccgtacggtagttcgtgaagccatcatcatgctggaagttgaaggctatgtcgaagtgcgtaaaggtagtggtattcatgtggtttccaaccagccgcgccatcagcaggcggctgacaataatatggaattcgccaattacggtccgtttgagttgcttcaggctcgccagctcatcgaaagtaatattgccgaattcgcggcaactcaggtaacgaaacaggacatcatgaaactgatggccattcaggaacaggcgcgcggcgaacaatgcttccgtgattccgagtgggatttgcagttccacattcaggtcgctctggcgacgcagaactccgccctggcggctatcgtggaaaaaatgtggacccagcgtagtcataacccgtactggaaaaaactgcacgaacacattgattcccgtaccgtcgataactggtgtgatgaccacgatcaaatcctcaaggcgctgattcgcaaagatcctcatgctgctaagctggcaatgtggcagcatctggaaaacaccaagatcatgttatttaacgaaaccagcgacgacttcgagttcaatgccgaccgctatctattcgccgaaaacccggtggtgcatctcgatacagccaccagcggcagtaaatgaaattcctgtccgacaggcgctgcaatgcgcctgtttgtctcgtcggtaagcgaaaagtataaagtgtcagcctgtgtaaatcctctcgccaccctcccctgcattcagcaaaatcagactccacggacatgtaattttgataacgaacaacgttgacctttgttacaattagattcaatttgaatttatgtttttgaatgctttcttatctcacgatttaacagggaatagttcaggctgtgttgatgtatcaaacccgcagaacataccaaaacagcaataacattgcggtagtgcatcttttaaaaccagcgtggcgttaaccgattcaccaggaataatgaatggaacttttgacccaattgctgcaagccctgtgggcgcaggattttgaaaccctggccaatccaagcatgattggcatgttgtattttgtcttgtttgtaattttgttccttgaaaacggcttgcttccggcggcctttttaccgggcgacagtttactggtattggtcggcgtgttgattgcgaaaggcgcgatgggctatccgcaaacgattctgctgctgaccgttgccgccagcctcggctgctgggtcagctatattcaggggcgatggctgggcaatacccgcaccgtacaaaactggctatctcatttacccgcgcattatcatcaacgcgcacaccatctttttcataaacacggtttaagcgcgctgttaattggtcgctttattgcgtttgtcagaacactgctgccgacgattgccgggttaagtgggctgaataacgcgcgctttcagtttttcaactggatgagcggtctgctgtgggtattgatcctgacaactctgggttacatgctcggcaaaacgccggtatttttaaagtacgaggaccagctgatgagttgcctgatgctgctcccggtggtgctgctggtgtttggcctggcaggttctctggtcgtgttatggaaaaagaaatatggaaatcgggggtaagggatgcaaatacctcgcatgagccttcgccagctagcctggtccggcgctgttttacttctggtcggcacgctgttgctggcctggtccgcggttcgccagcaagagtctacgctggcgattcgtgccgttcatcaaggcacaacgatgccagacggttttagtatctggcatcaccttgacgctcatggcattcctttcaaaagtatcacccccaaaaacgacactctgttaattacatttgactccagcgaccagagcgccgccgcaaaagcggtcctcgacagaacattgccccatggctacatcattgcgcagcaggacaataacagtcaggctatgcagtggctgacccggttacgggataactctcatcgcttcggataacttcctgttatccgaaacatatcactcactttggtgatttcaccgtaactgtctatgattaatgaggcggtggttaacactaccgcttcgttgtctggacaatcgttcctttgtaataggtccgaatcacaatggaaggttcaagaatgaaataccgcatcgctttagctgtttctctctttgctcttagtgccggtagttatgccactaccctgtgtcaggaaaaggagcaaaatatccttaaggagatcagctatgccgaaaaacaccaaaaccagaatcgtattgacggtctgaataaagccctgagtgaagtccgggccaactgtagtgatagccagctgcgtgccgatcatcagaagaaaatcgcaaagcagaaagatgaggtggcggaacgccagcaagatttagccgaggcgaagcaaaaaggcgatgccgataagattgccaaacgcgaacggaaactggcagaagcgcaggaagagctgaaaaagctggaagcgcgcgactactaactcacaatagtcactacttactcacctggagaaaactatgagcaaagaacacactacggaacatctgcgtgctgagttgaaatccctttccgatacgctggaagaggtgcttagcagttctggcgagaagagcaaagaagagttgagtaagattcgtagcaaagcggagcaggcactgaaacagagccgttatcgcctgggtgaaaccggtgatgccattgccaaacaaacccgtgtcgcggcggcgcgtgccgatgagtatgtgcgcgaaaatccgtggacgggcgtgggcattggcgctgcaatcggtgtagtgctcggcgttctgctgagccgtcgttaattatggcggacactcatcacgcacaagggcccggtaaaagcgttctgggcatcgggcagcgaattgtttctatcatggttgaaatggtagagacacgtctgcggctggcggtggtggagctggaagaggaaaaagcgaatctctttcaacttttactgatgctgggcctgacgatgcttttcgctgcatttggtcttatgagcctgatggtgctaattatttgggcggttgacccgcaatatcgcctgaatgcgatgattgccaccaccgtggtgttgctgctactggcactgattggcggtatctggacgctacgtaaaagccgtaagtctacgttgctgcgccatacacgccatgagttagcaaacgatcggcagctgctcgaggaggagtcccgtgagcagtaaagtcgaacgtgaacgacgtaaggcgcaactgcttagccagatccagcaacaacggctggatctttccgccagtcgtcgtgaatggctggagacaacaggcgcttacgatcgtcgctggaatatgctgctaagtctgcgctcctgggcgctggttggcagtagcgtgatggcgatctggacgattcgccatcctaatatgctggtccgctgggccagacgcggttttggcgtatggagcgcctggcgtctggttaaaacgaccctcaagcagcaacagcttcgcggttaacttccctctggccggagccattccggccttatccctcaaattttttgaagatttttgacagttttccttgctaacaatcatcattcaccacgtttatgattctctccatcgacagcaacgacgctaataccgcgccattgcacaaaaaaacaatcagcagcctgagtggcgcagtggagagtatgatgaaaaaattagaagatgttggtgtactggtagcgcgcattttaatgccgattctgtttattaccgctggctggggaaaaattactggctacgcgggtacccaacaatatatggaagcaatgggcgtcccgggttttatgctgccactggtgattctgcttgagtttggtggtggtctggcaatcctgttcggtttcctgactcgcaccacagccctgtttactgcgggctttacgctgctgacggcatttttatttcacagcaactttgctgaaggcgtcaacagcctgatgttcatgaaaaacctgacaatttctggcggattcctgctgctggcaattaccggtccgggcgcgtatagcatcgaccgcctgctgaataaaaagtggtaagcacgcgctatacttaacgataaaaaacgaggaggaagctcctcgtttttgctattggaggagagaaaaatgggtcaactgattgacggcgtctggcatgacacctggtacgataccaaatctaccggcggtaaatttcaacgtagtgcttccgcatttcgtaactggctcactgccgatggcgctcctggccccactggcacaggcggttttatcgcagagaaagatcgttatcatctctatgttagtctcgcctgcccgtgggcgcaccgcacgctgatcatgcgcaaactcaaaggactggaaccgtttatttccgtttccgtagtgaacccgctgatgctggaaaacggttggacctttgatgacagttttccgggagcaaccggagacacgctctatcaaaatgaatttctgtatcagctttatctccacgccgatccacactacagcggacgagttactgttcccgtgctgtgggacaaaaagaaccacaccatcgtcagcaacgaaagtgcagaaatcatccgcatgttcaataccgcgtttgatgcgctgggcgcgaaagcgggtgattactaccctccagccctgcaaacaaaaattgacgaacttaacggctggatttatgacaccgttaacaacggcgtgtataaagctggttttgccaccagccaggaagcttacgacgaggcggtggcgaaagtgtttgaaagcctggcacgactggagcagattttaggccagcatcgttacctgaccggcaaccagctaaccgaagccgatattcgcctgtggactacgctggtgcgttttgatccggtgtatgtgacccacttcaagtgtgataagcaccgcatcagcgattacctgaatctgtacggttttctgcgcgatatctaccagatgccggggatcgccgaaacagtcaatttcgatcatatccgtaatcattacttccgcagccataagaccatcaaccctacggggattattagtattggtccgtggcaggatctcgatgaaccgcatggacgagatgttcgcttcggttaaaaaaaggcaccttacgaggtgcctctgataattagctaagtgcatgttgttcatgtcggatgtggcatgaacgccttatctgacatacaaaacattgtacattcaatagattgcataacccgcgcagaccagataagcgtagcgcatctggcgattttgcgcttgtcatcagtcttagcgcgccttcacggcactttattaattccttgaacgaatatttactgccatttcattcacgtctattcttaatttgctgctttaaaaacaagtgattgagcaaaattgaggcaaaaatggactggtatctgaaagtactaaaaaattatgtcggtttccggggtcgtgcgcggcgcaaagagtactggatgtttattctggtcaacatcatctttacgttcgtgctggggctgctggataaaatgttaggctggcaacgcgctggtggcgaaggcatcctgacgacaatctacggtattctggtgtttttaccgtggtgggcggttcagttccgccgcctgcacgacaccgaccgcagcgcgtggtgggcactgctattcttaatcccgtttatcggctggcttattatcatcgtctttaactgccaggcgggtacgccaggcgaaaaccgctttggaccagatccaaaactggaaccttaaaacaaatctgctcgccggatgtctgactcatccggcttttatcattatgttgatgaatgaataatttactaatgtttatttaaaatatttcaatgtcgttatataaattacctataaaaaataaccatgtatttatcttaaatatcaaaacctttataacatccgaaaaagaaagatacgaatagcatttacacaatacccggaatagactttcgtcacttttaattaaagggatgtttttatgcagtggtatttgtccgtattaaaaaattatgttggtttctctggtcgcgcacgtcgtaaagagtactggatgtttactctgattaacgccatcgtcggcgctattatcaatgtcattcaattgattttaggtctggagcttccatatctgtctatgctttatttgctggcaaccttccttcccgtccttgcgcttgctatccgtcgcttacacgataccgaccgtagtggtgcctgggccttgctcttttttgttccgtttattggctggctcgtgcttctggtttttttctgcacagaaggtacttctggcagcaatcgttacggaaacgatccgaagtttggtagtaattaatcttagaattggggcgatatttcgcccctttttattaacaataataaatattattttccgttaaaaagtttgggaatttcccgcagacaccaggatttcgcttcccccatactgtcacgacgccaggccataataatatcgatctcgctggtgctttccgggctgacgacacgcaaccgcccttccgcaatatctttttcgaccataggatacggcatcgtcgccacgccaagccccgccagtaatgcctgacgtttatcttcaatcgtgctcaccgttaagcgcggctgtttgtccagcagctgtacggtcaacaccgggcgctcacgagcggtatccgccaccgcaattccacgatatttcacacgcgtcacttcagataacggttccggctcctgatgaatcgggtgatcaggcgcggcaacgtagacgttcattaacgtatagagcttgcggctgttgatctcgctgctggaacgaaaatgcatatccggcgcgataacaatatccgcccgcccctgctccagccgttcccacgcccccgccagcacttctgtgatgattgccagttgggtattggcttttgccgccagtttgtcgattaacgggaaaaaggcaggtgtcggtaccagcgcttcggtcacaatggtgagatgcgtttcccaaccgcgcgcgagagcttccgcatcagtagtcagtttatctgcggcttccagcaaaacgcgccctcgctccaacaacatcctcccgacattggtgaatttggtacgatggccgctgcggtcaaacagcaccacatccagctcttcttccagtttttgcatggtgtagctaagtgcggaaggcacgcgtcccagctcatccgccgccgccgcaaaactgccccggcgatcgatcgcatccataacccgtagtgcttccagcgttaatgccctttctttggccatttcgttctcattcaggaaatttgaacataccgggcagaatatctggctaacaatgtagcgtccagccccttaccataaaaggaagtaaagagaggtcaagaattatgattactacccgaactgccaggcagtgtggacaagcagactacggatggttgcaggcccggtatactttttcctttggacactacttcgacccgaaattgttaggctatgcctccctgcgtgtgcttaaccaggaagtgctggccccaggtgccgcctttcagccgcgaacctatcccaaagtcgatattttaaatgtgattctggatggagaagcagagtatcgcgatagcgaaggcaatcatgttcaggccagcgccggagaggcgttgctgctctctacccagccgggtgtcagctatagcgaacacaatctcagcaaagacaaaccgttaacgcgaatgcagctttggctggacgcctgcccgcagcgagagaatccgctgattcaaaagctggcgcttaatatgggcaagcagcaattaatcgccagcccagagggtgcgatgggaagcctgcaattacgccagcaagtgtggctgcaccatatcgtgctcgacaaaggcgaaagtgcgaatttccagttgcatgggccacgcgcgtatttgcaaagcattcacgggaaatttcatgcgcttacgcatcatgaagagaaagcggcgctgacctgcggtgatggggcgtttattcgtgacgaggctaacattacgctggttgccgattccccactgcgcgctttgctgatagatttgcctgtctaattgtttttacagggagatgatgatgagtaaaaaattggccaaaaagcgccagccggtgaagcccgtggtggcgaaagaacctgctcgcaccgccaaaaattttggctatgaagagatgttgagcgagctggaagctatcgtcgcggatgctgaaacgcgtttagccgaggatgaagctaccgcgtaaagacaggttgccggatgcggcgaaaacgccttatccggcctacaaaatccaacaacattaacgaattaaacaacccgtaggccggacaagatgcgccagcatcgcatccggcacgatccccaaaacctggcgtttatctggccttgctcgccataatctcgataatctgccgatccgtttgctgcatgctatggcttgctaacgcacacaggttggcaatgctctgctcaacatcatgcgccacaatcccttcattgccggtcacggcggtatcatccagcgccattaacaccgctttccacgcagcgctagcactggtgctaaccttcatcgcgcagctgttgctcgcaccatcgcaaatcatgccgctgacatcgccgatcatactgctgatcgccatgctgatggtttcataacgcccatccaccagccatgccatcccggcggcggcccccattgctgcggtcgttgcggcacacagcgcagacaaacgcggtaactggttatggatgtaaattgcgctcaaatggctaagcatcagcgcacgcgccagccgttcatcatccgctccgaagtgttctgctaccaccaccacaggcattgttgcggtaatcccctggttaccgctgccggagttactcatagccggaagcgtagcgccgcccatacgcgcatcggatgccgcgctggtacgaatcacaatggaactagagagatctttcgccagcaaaccgcgctcgcactgtttttccagcgtcgcgccaatatgcagcccccacttaccgctcaaaccttcctggcttaacgcacaatttagcttcgcggaatcgagaataaagcggatcgccgcaaacgggacttcattgacgaacttcaggatctcagccagcgtcgttctggaaagcaccgtcagcggagactcttgctcgccctctgccacacacgcctgctgggtaaacaccacaccatcgtgcgtctcgatatgcacaatgttggtatgcccgccgacgatggtgacacacgcccacttctcaccgttccagactttggcgcgactgaagaggatttcatcgcaaggttcctggatcttaacggagactttccccgccgccagcagtgctttggcatcggcaattgcctgcgctgttgcgtctttcagcacttccagcccggcgttggcatttccacctaacgcccccagcgccgccgcaatcggcagccccaccattcccgtgccgggaacggtgacgcccagaccgttcttcatcagatttgggctaacccaggcttctacacgttcaaccggaccttccagttctgccgcagcaaccgccgccgccagcgccagactaatcggttcagtacatcccagcgccggttttacttcctcctgaacggcgaggatgtaacgctgccataacggatttaaagtgctatcaaacatattaaaaaccttaaaatttcaggtaaatcaagaaaatgccaggaacggagaaacacacagcaacaaaccagtgacgataatcaggtacagagacatccctttgtatttgtgcaatgctggtactttgtaaaccagccacgccgggatcaggcaccctaccatgccgaaaatcgggctacagatagaggtgaagctcaacaccggtgcgttcagtacgatggcgctccaggccagcaaaatggcgaaaatcatgatgccgcgctgaacgagattttcgttaatcttctcggcaggcatcttgcgacgcaggatgttcattacgatcccttgcgttgcttcgcgaaagcctaaatagacgccaaagaatgcagtcatgacagcaaagatattgagaatgacgctgaccactttcacccacgctgcgccgtcaccgctaataaactgtgcggcaatcgccagcgcggaaatattctgctcataggcttttaccgcttcgtcatgtcccatcgccagcgtgaagctcacggcgtagaaaaagacggtgacaaacaaaatgccaaacgcgatattcattgcccgcaatgctttatgccgcgccacttcaatacttttttcccggctgcgataagagatcaccatcggacttaacgtctggataaacagaatgctcgtcagggtaaacggcagcgtaataatggcgtttttcaccagcagccccagcggcggtaggctaccgacgttatacagatgccacattcccaccatgctcacgcccagcgccgcgaccaccagcagcttggtcagcaccatgccggtgctaattttgaataacaatttctcgccgcgactggagatcgccaccagaatgcaaatcagtaccagaccataaaagggactgtcactcagcaacccttccgtcacgccgaaggtatgcaggtaggaagcactatcgttggtgatggcggtggaatagacgaacatccaaatcaccagcattacgaaatagagcgcacctaacaggatgccccagtttttacctaaataaccgctaatgacgctcgggtaatctttacattctggactttctgccagcgtattaataaacaatcgctgaaacagatacattgccgggtaaccaatcacgctactgagcaaaaatacccacaatcccatcaaaccgacctgcaccgggagaaaaacaatccccgcgccaatcgccatcccgatactcataatcacccagccggtgtcagtactgtcgaatttgatcgcttctcgccactcgctctcactcattccagcacgacccgccggggtcgaagcgtctgcaatgacgcctttattcgatgcaatttccataatttctcgctcaatattttgtagggcttattatttttttccgagccgcatcaaggcgatatgcggtctacgtttttgcaggcgagttattagaataaagaaatgatacgcgcgaggtcagagaaaatcttcacaatcaagactttgaaataacggagatggataagaattttctactaaattaatcgcaggagaatattcattctctatttgcggcagatcacaaaaaaaaggtgcacatttgtgcacccaaggatgaaagctgacagcaatgtcagccgcagaccactttaatggccagtcctccgcgacttgtttcgcggtatttatcgttcatatctttgccggtttcatacatcgtctcgatcactttatcgagactaacacgcggtgcgctggtgcggcgcatcgccatccgcgcggcgtttactgctttcacggcattaatggcattacgttcaatgcacgggatttgtacctgtccggcaaccggatcgcaggtcagcccaaggttatgctccatcgcgatttccgccgcattgcatacctgcgccggactgccgcccagtagttcagttaaccctgccgccgccatactacaggccacgccaatctccccctgacagccgacttccgcgccagagatggaggcgttcattttatacagcgcgccaatagcccccgcggccagaaaatagcgggcaatactccgctcgtttaccggacgacggaacttatcgtaataagccagtactgccggaataatgccgcacgcaccgttagtcggtgccgttaccacgcgcccgccagctgcgttttcttcactaaccgccagcgcgtacatgttgatccagtcgatgacattcatcggatcgttagagatgttatcgctggaaaccagctgacgacgcagcgctacggcacggcgcggcacattgagcggaccaggcagcacgccttcagtgttcatcccacgttcaataccgtcatgcatcacttgccagatacgggcaaaaccggcgtcaatttccgctttgctgcgcagcgctagctcgttgtgcatcatcagaccagatatagacaggccgttgtaatcacacattttcagcagttcacctgcactgtggaaatcgtaaggtacggacgtttcgacatcgtggctcaggccgaagtgttcttcttcgacaataaacccgccgccgacagagtaataggttttacttaatagctcttcctgtcccttccaggcagtgatccgcattccgttctcatggcgaggcaacatttcgggatggaagataatgttctttgctacaggaaaatcaacaatatgcgcaccagatgccactggcagccgcccgctgcgcgttactaactctataaatgcagggatctcatcaatgacaacatcctgcggactgtttcctgccagtcccatgatgatggcgacatccgtggcatggcctttgcccgtcagactcaagctcccgtacagatcgaccacaatatggctcgtcgcggttaataagccgctactttccagccgatcaataaaactttttccggcattcattggccccacggtatggctactggagggaccaatcccaattttgaaaatatcgaatgcactaatcatatccacaccctcggattgccgttcagtgaagtggagcggaacgaccttacgaccgtcccgctcacgaggctttacgcactacgtactgcgatggcttcaatttccagcttcacatctttcggcaaacgcgcgacctgcacacagctccgggtcggataggtcgcctgatgctcatcgaagaactgcttatagacttcgttgatggtggcaaaatcattcagatcggtgataaacacggtcatcttgatgatatcgcccacgctcagcccggcagcaaccacgatcgctttgacgttttcgaggcttaaacgcgcctgatcttgcacatcagccgggatctcaccggtctgtgggcaaaccggtatttgcccggaggtgaagaccatgctgcctaaatcaacgccctgaacataagggccgattgcgcctggggcacgttgcgtttcgataatctttttcatacatcctccggcgtcagagcgcctgggtaaaggtacgactaataacatcctgttgctgttcacgggtcagtgcgttgaagcgcacggcgtagccagagacacggattgtcaggttaggatatttttccgggtgctcgatggcatccagcagcatttcccgattcattacgttgacgttgaggtgttgaccgccttcgacatccgcttcgtggtggaaatacccatccagcaggccgacaaggttggttttacgtactggatcttctttgcccagcgccgcaggaacgatactgaaggtgtagctgatcccatctttggcgtaggtgaacggcagtttcgccacgctcgtcaaactggccacggcacctttgcggtcacgaccatgcatcgggttagcgcccggcgcgaacggtgttccggcgcgacgaccgtccggcgtattaccggttttctggccgtacaccacgttagaagtgatagtcagaatgctctgggtagggacggcgttgcgataggttggcagcgctttaattttcttcataaagcgttcaaccaggtcgcaggcaatgctgtctacgcgctcgtcgttgttgccgtactgcggatattcaccgtcgatttcaaagtccaccgccaggccgttttcgtcacggattggtttcacgcgggcatatttgatggcagacagggagtccgtcgccacgctcaggcccgcgatgccgcatgccatagtgcgatagacatcacgatcgtgcagcgccatcaggctagcttcgtagctgtacttgtcgtgcatgtagtgaatgatattcagcgcgctgatgtactgcaccgccagccagtccatgaagtgatcgaggctgtccatcactttgtcgtaatccagcacgtcgtccatcagcggtgctgttttcggcccgacctgaatcttcagcttctcgtccaccccgccgttaattgcgtagagcagcgttttcgccaggttagcgcgtgcaccaaagaactgcatttgcttaccaatcaccattgggctgacgcagcaggcaatcgcgtaatcgtcgctgttgaagtcagtacgcatcagatcgtcattttcatactgcaaggaagaggtgacgatgctcacctgcgcggcatattttttgaaggcaatcggtaattcttcgctccaaagaatggtcaggttaggttccggtgccggccccatagtgtgcagggtgtgcaaatagcggaaggagtttttggtcaccagcgtacgaccgtccagccccatcccgccgatcacttccgtcgcccagattgggtcgccggagaacaggctatcaaattccggtgtacgcaggaagcgtaccatacggatcttcatgatgaagtgatcgatcagttcctgtgcctgctgctcattgagtacgccagctttaaagtcgcgctcaatgtagatatcgaggaagcttgccgtgcggcccaggctcatcgcgccgccattttggcttttcactgccgccagataagcgaagtagagccactgcaccgcttcctgcgcattctgcgccgggcgagagatatcaaagccatatttcgccgccatttcctgaatctgcaacagcgcatgacgatgctctgccagctcctcacgcagacggatggtggcttccagatcctcgcctttttccagacgagactggagatcggcaaattgcagttcgcgttcacgtaccagataactgatgccatacagcgctacgcggcgatagtcaccgataatgcgcccacggccatagccatctggtaaaccggtcagcacgccagatttacggcagcgcagcatatccggactgtaaacatcaaatacgccctggttatgggttttacgcagatcggtaaacagatattcaaattcactgtccatttctcggccataggcgtggaaactacttttaatcatattaatgccaccgaacgggtgtagcgcacgtttcaacggcgcatccgtttgcaggccaacaattttttccagcggctggttaatatatcccgcatcatgagcggtaattgtggtggcaatattggtatcgaaatcaaccggcgcgtgggttgcattttcgatacggatgccttccattactttttcccacaattccgtggtggcaggcgtcgcttcggcgaggaaagattcatcgccttcatacggtgtatagttatgttgaataaaatcgcggacattaatttcgtttttccagtccgtacctttaaagccaagccatgcgtcggcgtacagcttatcgctggtatcaatatctaccttcatgaaaaataatctctctacaatacttcaactaaattatgcaaattctgcgggcgcgttaactttgcctaaatgaatggcatccaaagcaatcattttttcttcgttagtcggaataacggcacaaatgacacgcgcattttcactggaaacaattcgctcaccacaggagttagagcgattattcatttctgtatcaatctctaagcctaatacagccaaatgttccatgaccagacgacgaattaagctactattctctcctattccgccggtgaatataattccatccaggcgacgtaaactagctgcgtgtccggcaatatgacgggcaattcggtgaacaaaggttttaattgccagttgcgcgcgttcgtgaccttcatgccaggctttttccagaacacgtaaatcgctagaaagaccggaaatacctaataatccgctctctttattcactacgcgttccaggtcacccaggctctggttggtttggctggcgacccaggacatcgcaccaaagtcgacatcgccactgcgggtacccatcatcaagccttccagcggcgtcattcccatactggtatcaacactctgaccgttgcgaaccgcgcagatactcgcgccattgccaagatgcgccacaaccaggccggagtcatcttccgccagattcagcaggctatgtgcgcgctgggaaacatagcggtggctcgtgccgtggaaaccataacggcgtacacctaactcttcataatatttccacggcaggccgtataaataagcttccggagccatcgtctggtggaaactggtatcaaataccgccacctgagttacgcccggaaataattgctgcgcgctttcaataccacttaaattggcgtaattatgcaggggtgccagtggagaaacgcgacggatattatcaatgacttcatcggtaataatggcggactcggtaaaaatactgccgccgtgagcgatgcggtggccaattaaggccacactgtcatttaaattccgtttttccagttcaaatgcaattgccttcaatgcaccttcgtagctgtggtgagccagcggtgctggctctcccccatttacggataagaatgcattttcgctgttaataccgtcggcaataccactcattaatacttcacagtcgctggcatcgagcacggaaaacttaatgctagagctaccacagttaataaccaaaacaaccggaaattcattcatctcttttctcatcctgagttacggattaaaacagtttgtatacgatgttcaggatggtcagcagaccaatcacggtaacaaacacgttatccagacgaccacggtatttcgccagagacggcgctttacggatggcatacatcggcaacaggcacagcagggatgcgataatcggtgcgcccatggcttcaatcaggtcaaggatgttcgggttggcgtaggcaacaacccaggtggagcccatgatgaagatcatgctgatagtgttcagtttacccaggctcactttagttttgtcgcctttataaccaaacttcaggaccaggccattcagaccttccagcgttcccagatagtgaccgaagaaagatttgaagatagccacgagtgcgatgatggaagccgcatattccagtgtaatcgcgaacgttgttttggtaccggtcatggacgcaaagtggttagccagataagaaagcactggaatattctgcgctttggcttccgccatgttggccggagacagagtaaacaggcagctaaaggcaaagaacatcaccactgcaaccatcagcatgctggcacgagaaatgatttgggaacatttacgttcggtgaagtcgcgaccgaagtctttctcatactcttcacgcttagaaaccacgaaggaagagacgattgggctgaagttaaaggagaaaaccatgatggaaatccccagccagacagtgatcaggataccgtcatgaccggttaagctcaggctaccgaggtcaacctggtcgataactgcagagttccagtaagggatcaggctcaaagaaatcagcaccaggctggcgataaacggccataccaggtagctcatcactttaaccatcagatccttaccaaaccagatgacgaaagccatcagcagcaacaggaacagcgccacaaagccgcgattcagcggtgcaaagccgagctggttttcccagaacgtcataaaggtattggtaatagtaacgccataaatccacagcagtgggcaaatcgcgaagaagtacaggaacgtgataaccacgccgccagttttaccaaaatgctcttccaccgtttccgtaatgttgccggaagggttagagccagaaagacacagacgcgccagcgcccggtggcaataaaacgcgatggggtatgccaataccaacatcagaagaatcgggatcagtccgccaaaacctgcgcggatagggaagaacagcaccccggcgccgattgccgtaccaaacaagcctaacgtccatgtggtatcacttttacgccaggagctttgttttgtctggctggatacaatgctatcactagtactcatatcctatcctcaacgaattaattaagcgtcaacgaaaccggtgatttgagagacgcgagaaagatcgatattgccgccggaaataatactgacggtttttctgttttgaatatattggtctaatttaccgcttaataatgcagcacatgccagagcgcctgcgccttcggtgacgactttattgcgctgaattaaggcaatcatactgtttctgatttcgtcttcgctgaccagcacgatgtcatcgactaattcacgaacgatttcgtaagttaaattacccgggcgggagacatcacaaccatccgccagggtgccggtagttcggtgcgtggttatttctccggagtggaaagaagccgccatgccgtgaacgttttcagactgtacgccaataacacgaatggtcgggttaatagatttaattgccaccgcaataccagcaattaaaccgccaccaccaattggcacaatcacgttatcgacatcatagagatcttccataatttccagaccaatcgttccctggccagcaatcactttcggatcatcgtaaggtgggataaaaatacggccttccatttcgacaatttcgctcactttagcgatagtgtcgttgaagttatcaccatgcagaacgacttctgcggagtagtcgcacgttgccgctactttggattttggcgcaccttttggcatcaccactttaccgtcgatacccagcatcgcgcaggagagggaaaccccttgcgcatggttgcccgcagaacaggccaccacgcctttgcgtttttccgcatcggtcagactacttaatttattaaatgcgccacgaattttaaaactacccgtacgctgcatattttcaaacttcaggaatatttcacctttgcaacgttcactaaaatagttggagcgaggcatgcctgttttataaattcgcccagccagtcgttgtttcgcttcaataatgtcatcaatagcaaccggcagatcgtatgtaatatgcattataaaacctcttcgcctgaattaaatatgtaggtaaccgtaaccgacacctgcaagacagacaggtggattatttatgtttaaataaaaacaaataattaaccaacttctattaattgccttcgtctacacccattataagaactatactctttggctaattccaccaaaacgcttgctgcttttttaatacgataatttttgctccataccgcggcatattgtgccacaggtaatgtttcttcaaccggaatagtaataaattgattagaaccaaaaggactcgtcatatcacaaggaattacagttaagaaatcagcattgagaacaagattataaattgtcacgacactgtcggttttaacgatgttttcaatactgatgccatttctttgtaacgtagtaagcagttcgctgtagtaccccatattagtttgtggcaacacccactgttcgttcttcaagctctccagcgtggtggtgccggtgcatgttcgggacttactggctaccagcacaaactcggactcgaacagcggctcaacatgtaaatcctgaagcttcatttctgcacttaacgtaccaatcgcaaaatccagtcgaccgtcgcggattgccggtaagaagctagacagttgcgcttcatacatagaaacctgcgctttcgggaacacctctttgaacttgttgatcatcccactcataaaagtaaaaccaatcaaactaggaaaaccaaaactgacttccaccaccgcctcagaagacataccgcttatctcattaaccatatttttcatttcacgggtaatggattcggaacgggagagtaacaattgaccggcaggtgttaatgttacaccggtatttttccgcaccactaattccacaccaaaataatcttcaatatcgttaatgattttactgacggccggttgagttaaccctaattcttttgcagcgctgccgatagaaccacttctaatgacttcctgaaagactaccaggtgctgcgttttcggaagaagaatagtgctcataacgacctacgttaattacctcattgacggcatgaagtgtatcaaaatgaaatgaacaggatatgtgcgaccactcacaaattaactttcaatactttccagagtatcgttattacaattaaatacctttaaatatcaacaagttaaagtataaaaatcagcataaaccctgatttttgtcaaaaaaaatgacggggataaccatattttatggcgataacatcattcgttatgtggttaatacaaaaaaggggctgagaccatatttcaagcaattaccggataattaccaggcaaaatttgagttaaatttaatgagcaagttcagtaattttattataaataaaccatttagtgtgataaataatgcggcatgtcacatttttagtcgctatttgttggagaacaaacatttattttatcaatattttaaaattagcaatacatgtattgatcatctcgaacaattgattaacgtcaactttttctcttctgacaggacgagtttttgtgaatgcaatcgttttccataaattcttctcccctcataggcgacgaatagcattttgtgttgaggatcacaaaacgaataattgctgatcgccgcgataaggtcagacaaagacaacaagggaaattttcacagagcttttgatcggcgtaggccacagaatgttgcttcgtttactgtaacgccgggtaaatgagcgttttttgatagtgcgaaagaaccctgcgaggaaaataagcatctattattgtttgtcatgatgacaaggcaggcatcaatgaaaggcttcccaattgcgcatatttttcaccctagtatcccgccaatgcacgcagtggttaacaatcacaatagaaatattgattattggacggtaaaaagaaagtttgcagaaattgtctccaccaatgacgttaataaaatttacagtataagtaatgaactgcggagagtattatctgcaataactgcattgaatttctatcatggcgatgttccttctgtcatgatccgaatccaaccggaaaatatgagtccattcattatagatatttctacaggagaacatgatgattatatcatacaaacattagatgtaggcacttttgcaccttttggtgaacaatgtacttgcagtgccgtcaataaaaaagagctggaatgtattaaggagacgatttctaagtattgtgcaaaattcacccgaaaagaagccatcttaaccccccttgtgcactttaataaaaccagcattactagtgattgttggcaaattctcttttttagtcccgatcattttaataatgatttttattgattatttataaaggataaaataatgttccctgttagtagtattggtaatgatattagtagtgatttagtccgtcgaaaaatgaatgaccttcctgaaagcccaacaggaaataacctcgaagcactagcaccaggtatagaaaaactaaaacagacctctattgaaatggtcactttacttaacacgttacaacctggtggaaaatgcattatcactggtgattttcaaaaagaattagcgtacttacaaaatgtaattctttataatgtcagctctcttcgtctggattttttaggttataacgcccaaattattcaacgaagcgacaatacttgtgaacttaccattaatgaaccgttaaaaaaccaggaaatatccacaggtaatatcaatattaattgcccattaaaagatatttacaatgaaatcaggaggttaaacgtaatttttagttgtgggactggagatatcgttgatctatcctctctggacttacgtaatgtcgatttagattattatgatttcacagataaacatatggctaatactattttaaatccttttaaattgaatagtacaaattttactaatgccaacatgtttcaggttaattttgttagtagtacacaaaacgccacaatctcctgggattatttactaaaaataacgcctgttttaataagcattagcgatatgtattctgaagaaaaaatcaagtttgtcgaaagttgtttaaatgagcctggagacattaccgaagaacaattaaaaattatgagatttgcaattataaaatctataccaagggcaactcttacagataaattagaaaatgaattaacaaaagaaatatataaaagcagtagcaaaatcatcaattgcttgaacagaattaaattaacagagatgaaagaattcagtagtgaaaaaatatatgattacatcgatataatcattgaagattatgaaaataccaaagaaaatgcttatctggtcgtcccccaaattaattatactatggatttaaacatagaagactctagcagtgaagagttacttagtgataataccctcgagaaagacgaaaattctccggacaatggctttgaggtcggggaatataacacatatgaagcatataacagtgagaagcaatattttaccagagaggactatacgtatgattacgaccttttaaatgcaatataaacttaataacttcttacaaagtctattattaataccgtagatatttattcatcttaccctgtgcaccaaaagcaaaaactcactgacgcgggtttgaaactgatggcaaccgcaaaaatgcctgatgcgctacgcttatcaggcctacgccatctctgcaatatattgaatttgcgtgcttttgtaggcaggataaggcgttcacgccgcatccggcatgaataaagcgcactcaacaatctgaaacccgccggaacggtttattacgtacatcaggtaaaactgaccgataagccgctttcttttgggtatagtgtcgtggacagtcattcatctttctgcccctccaaaagtaaaaacccgccgaagcgggtttttacgtaaaacaggtgaaactgaccgataagccgctttcttttgggtatagtgtcgtggacagtcattcatctttctgcccctccaaaagcaaaaacccgccgaagcgggtttttacgtaaaccaggtgaaactgaccgataagccgctttcttttgggtatagcgtcgtggacagtcattcatctttctgcccctccaaaagcaaaaacccgccgaagcgggtttttacgtaaatcaggtgaaactgaccgataagccgggttctgtcgtggacagtcattcatctaggccagcaatcgctcactggctcaagcagcctacccgggttcagtacgggccgtaccttatgaacccctatttggccttgctccgggtggagtttaccgtgccacggactgttaccagccgcgcggtgcgctcttaccgcaccctttcacccttacctgatcccgcttgcgcgggccatcggcggtttgctctctgttgcactggtcgtgggtttcccccccaggcgttacctggcaccctgccctatggagcccggactttcctcccctccgcccgtctcccccgaagaggacgacgacgaagcggcgactgtctggtcagcttcggcgcgcagtatagagggtttgcgcgcccttgtcaccccgcgttgcgcattccaatcgccagtgtcgcggcgatattacgactagcacggcagatattgtcataagccccgcggaatgcttcgtccaacgtacctatgctggtcaatacgctgaagaccgcatcaatgccatgctgatgtacaacgccaacatcatcggtcaggctacccgcaatgccaatcaccggtttatggtacttcttcgccacgtttgcgacaccaatcggtaccttcccgtgaatactctggctgtcaatacgcccttcaccggtgatcaccagcgtacaatcgtgaatatgttcctccagattcagcgccgtagtgacgatttcaataccacttttcagttccgcaccaagaaacgccattagcgccgcgcccataccacccgcagctcctgcaccggggacatctttcacatcaacatgcagcgcttttttaatgacctcggcatagtgagagaggttattgtccagctcaacaatcatcgcttcactggctcccttttgtgggccaaagatgcggcttgcgccgttatcgcccaccagcggattggtgacatcacaagcgacgcgaatgacgcaatcttttaagcgcggatcgaggccggaaatatcaatatcattcagagtattaagactaccgccgccaaaaccaatttcattgccgttggcgtcgcataatttcgcccccagcgcctgtaccatgcctgcgccgccatcatttgtagcgctgccgccaatgccgataataatgtttgtcgcaccgctctccagcgcctgcaggattaactcgcctgtgccgcgactagtggtcacgagtggatcgcgtttttccgcaggtaccagctccagcccactggccgccgccatttcaataaacgcggttttgccatcgccggagatcccccaactggcattcactttctcgcccagcggccctgtaacccaggcgtgacgttcagccccctgggtggctgcaatcatcgcttccaccgttccttcgccaccgtcggcaaccggaacagaaacgtactgtgcatcaggaaaaatttcccgaaatcctttttctatcgcctgcgcaacctcgctggcagataaactttctttataagagtctggggcgattacgattttcatacctatgcctgttaccacatgacgccggagggcgtttctcttattcggcctggattccaggcccggattgcaatacgccatccgggcacgacgtcattaacgagtaacttcgactttcgccagtttttcgtagtagcacgccagggcgctatgatccgccgttcctaaaccatctgctcgcagtgcctgcatcatctccataaccgcagctgtgagcggcagttgtgcgccgacgccgtgagaagtatccagcgcattcgccagatccttaatatgcagatcaatacggaagcccggcttgaagttgcggtccatcaccatcggcgctttggcatccagcacggtactgcccgccagtccaccgcgaattgcctgataaaccaggtccgggttaacgcccgctttagttgccagcgttaacgcttcactcatcgcggcaatattcagcgccacaatgacctgatttgccagtttggtgacgttacctgcaccgatttccccggtatgcaccacggaacccgccatcgctttcatcaaatcatagtatttgtcgaaaatagccttgtcgccgcccaccatcacactcagcgtaccgtcgatggctttcggttcaccgccgctcaccggagcatccagcatatcaatgcctttcgctttcagcgcttcgctgatttcacggcttgccagcggtgcgatagaactcatatcgatcaataccgtacctggcttcgcgccttcaataatgccattctcacccagcgccacctctttcacatgaggggagtttggcagcatggttatgatgacgtcgcactgttcagcgatcgctttagccgtagacgctgtttctgcacctgcagcaatcacgtcagcaatagcttctgggttacggtcagcaaccaccaggctgtaacctgctttcagaaggtttttactcattggtttacccataatccccaggccaataaaaccaactttcatagtcatatcaatcatctctcttgttgcggtggtggttattttttaaaggtatcagccagtttctgagtggcagagcggaagacgccgagatcgctgccgacagccacaaacgtcgcgccccattccagataacgacgcgcatcggcttcgaccggcgcgaggataccgctgggtttgccgtgcgcgctggcacggttaaaaatgtgctgaattgctttttgtacatccgggtgacttgcattgccgagatggcctaatgccgcggccagatcgctggggccgacgaagatgccgtctacgccttcggtagcggcaatggcatcgacgttatctacgccctgctgactttctatctggaccagaatagtgatgttcttgttgctctgagcgaaataatccgccacggtgccaaacatattggcgcggtgagaaacggagacgccgcgaatgccttccggtgggtaacgggtacttgccaccgccagctctgcttcctcttttgtttctacaaaaggaatcaggaagttatagaaaccgatatccagaagacgcttaataattaccggctcgttggtcggcactcgcactactggcgcgctggcgctgcctttcaaggccattaactgcggaataaacgtggagatatcgtttggcgcatgttcgccatccagcaccagccagtcaaacccagccaaaccaagaacttcagtgctaatcgggttagagagtgcactccagcaaccaatttgtacctgtttcgcagccagtgcggctttgaatttattcgggaaaacatcgttattcatcgcttatacctttgcttatttctgcaattccatacgtttaatgtcgccaactacgaagaggtagcagaccatcgccatcagcgcactacatcccacgaaaaccagtgctgcattgaaggagtgcagttcacttaccaggtagccaatcaccagtggagtgacaatggaggcaacattgccaaagacgttaaagacgccgccgcagaggccaacaatctctttcggcgcggtgtcagaaatcaccggccagcccagcgcaccaaatcctttgccaaagaaagccagcgccatcagcatgaccaccagcgtggtgttgttggtgtagttacataagatgatggtggaagccagcaacattcccagcacaatcggtagcttacgtgccagggtcagggataaaccgcgtttgatcagataatcgctgaagacacctcccagcacgccgcccgcaaaaccacacagtgctggaatgctggcgaccagacccactttcagaatgctcatgcctttttcctgcaccagataaatcgggaaccaggtgaggaagaaccaggtgatggtgttgataaaatattgtccgaaaaatacgcccagcatcatgcggttagagagcaattgcttgatgtaatgcagtttgggtccgcttgctgccgcactgcccggctttttgtggtccatatcgaccaccgcgccattttcagagataaacttcagctcttccgcagacatacgtgggtgatctgtcgggttatgaatcaacttgatccacagcgccgtcagcacaaaaccaatcacccccataacggtaaagacgtgctcccagccccaggcgaaagtcagccagccaagcagcgggctaaagagcgccaggctgaaatattgcgcgctgttaaagatggcggaggcagtaccacgttctttcgtcgggaaccaggcggcgacaattcgggcgttcgccgggaaacttggcgcttcgctgaagccgagcataaagcgcataaagaacatggagatccctgcccaggccagcgggaacatatcaacaaagccttgcaggaaggtgaataggctccagaaaaagaggctgtaggtgtaaacttttttgctgccaaacttatcaagcagccagccgccggggatttgcatcagcaagtaggcccagccaaaagcggagaagatgtaacccatgctaaccgcacttaactgcaactcttttgccacttcggtaccagcaatagacagcgttgcacgatcggcgtagttaacggcggtaacaataaaaataatcagtaatattaaatagcgggtatgcacgcctttctttttttcgtcaacggtgtccagaatcattttatttacctcgggtacttatgctgatttttattattatggggaaggtgttatttatgagtttcatttatgccgtaacgacaatgaactcgggaattagtataagcagcgcgagaataataatcattgtgcaaatgctaatttaattaatactatttaaatattattttgagcatatgcacataaggttgcgcgctaaagcacagatttgcgctttaccttaccgggcggcactgcaatccctgaaatgattgacattgatcacatttctgcgtttaaactcctgacattcttatttcacccaatgaagtcatttatttttaaatgagaccaggtcctcattttaataacccctggctggagaatattgcacaatggccaacatcgaaatcagacaagaaacgccaactgcgttttatataaaagttcacgacacagataatgtggcaattattgttaatgataatggcctgaaagcaggaacgcgttttccggatgggctggaattaattgaacatattccccaggggcataaagtcgcattgctggacattccggctaatggtgaaattattcgttatggcgaagtgattggttacgccgtgcgtgcaatcccacgcggaagctggatcgacgaaagcatggttgtactaccggaagcgccgccgttacacacgctgccactggcaaccaaagtcccggaacccttaccgccgctggaaggatacacctttgagggctatcgcaatgccgatggcagcgtgggcaccaaaaacctgctcggtatcaccaccagcgtccactgtgtggcaggcgtggtggactatgtagtaaaaatcattgaacgcgatctgctaccgaaatacccgaacgtcgatggcgtggtggggctgaatcatttgtacggttgtggcgtggcgattaacgcaccggcggcagttgtacctatccgtaccattcacaatattagcctgaatcctaactttggcggcgaagtaatggtgattggcctgggttgtgaaaagttgcagcctgagcgcctgctgactggaacggatgatgtgcaagctattccagtagaaagcgccagcattgtcagtttgcaggatgaaaagcatgtcggttttcagtccatggtcgaggatattttgcagatcgccgaacgccatctacaaaaactgaatcaacggcagcgagaaacctgcccggctagtgaactggtcgttggtatgcagtgcggtggcagcgatgcgttttctggtgtaacggcaaacccggcggttggctatgcgtctgatctactggtgcgctgcggcgcaacggtgatgtttagtgaagtaacggaagtgcgtgacgcgatccatctgctgacaccacgcgcagtgaacgaagaggtcggcaaacggctgctggaggagatggagtggtacgataactatctcaatatgggaaaaaccgaccgcagcgccaaccctagcccgggcaacaagaaaggcggtctggcaaacgtggtagagaaggcactcggctccattgctaaaagcggtaaaagcgcaattgttgaagtgctgagccccggtcaacgcccgactaaacgcggattaatttacgccgcgacgccagccagcgattttgtctgtggcacgcaacaggtggctagcggtatcacagtgcaagtgtttacgaccggtcgtggtacgccgtacggcctgatggcggtacccgtcattaaaatggcaacccgcaccgagctggcgaaccgctggtttgatttaatggatattaatgcgggcaccatcgctaccggcgaagaaactattgaagaggtgggctggaagttgttccactttattctcgacgtcgccagcgggaagaagaaaaccttcagcgatcaatgggggctgcataaccagctggcggtgtttaacccggcaccggtgacctgatttcttttggaacgtccctcgcaaaacatggccttagtgccatgtttttattgtttaaagcccccacgtccattaataatgcatttgcattaccttagttcaagcttataatttgagcagaaaacaggctgtaaaaggacagtgaatcatgcccgctaatgctcgctctcacgctgtactgaccactgaaagtaaggtcacgatacgcggacaaacaactatccccgcgccagtgcgtgaggccttaaaactgaagccaggccaggacagcattcattacgaaattctgcctggtgggcaagtatttatgtgccgactgggagatgaacaggaggatcatactatgaatgcatttttgcgttttctggatgcagatatccagaacaacccgcaaaaaactcgtccattcaacattcaacaaggaaagaaacttgtcgctggcatggacgtcaacattgatgatgagattggcgacgacgaataatggattttccacaaagggttaatggttgggcgctatatgctcatccctgttttcaggaaacctacgacgctttagttgccgaagtcgagacattaaagggaaaagatcctgaaaattatcagagaaaagccgccacaaagttattggcggtagtccataaagtgattgaggagcatatcacggtcaatccaagtagtccggcattccgtcatggcaagagcttaggctctgggaaaaataaagactggagtcgggtaaaatttggtgctggtcgttatcgtctcttctttcgttatagtgaaaaagagaaagtcatcattctgggatggatgaacgatgaaaacactctgcgcacctacggtaaaaaaacagatgcctataccgtattcagcaaaatgttaaaaagaggacatcctcctgccgactgggaaaccctcacccgagaaacagaagaaacccattgatggtgttcacaatgcccgccgaacgcattcgtgttgaccagcgggcatcctttctcactccccgaccagaatcacttcaaccccagcctttcgcagtccttccaggctatccgcaggaatgccttcatcaacaatgatcatgtcgatacgttgagtatcaatgatcttatgtaaactggaacgattgaacttactggaatcggtgaccacgatgatccgttccgcaacttcgcacatccgacggtttaaacgagcttcatcttcattatgtgtgctgacgccgcgctccagatcgatcgcatctacaccaagaaacagcatatcgaagtggtaattttgcaggctttgctcagcctgatcgccgtaaaaagattggctctgacggcgcaaatgcccgccggtcatcagcagctcaacgccttccgcttccagcaacgcattagccacgttcataccgttggtcatcgcaattacgtcagtgtgcttgcgcatcagacgagcaatctcaaaagtggtggtcccggaatcgaggataacccgatgacctggctgaatcaactcaacggcagctttcgcaacgctgcgtttcatcgcggtgttcagtgcgcttttatcttccacacttggctcgacactcggcgtcgtgctatcgcagatcaacgcgccaccataggcacgcacagcgatcccctgcttttccagaaacgccagatcgttgcggatcgtcacagtagatacgccatacaatgcgctcagatcgttaacctgcacactcccttgctgtcgcagacgctgaatgatctgttctcgtcgctcgctggtgccagtcactcgcttctcaccactagcgtcggtattactcatagtaagtcctttcgtaaaactttcgtttcatttcgttttgcctattaacgcctttctattaagcaaatgcaagcccaccttgcccattgacgcaagctactctcgtttcagtgactttcattatgtttcttttgtgaatcagatcagaaaaccattatctttcgttttatttttatctcaccatgacgcagtatcaactgaaacaaaacgaaagattaatatcgcagtaatctgaactggagaggaaagtgaaacatctgacagaaatggtgagacagcacaaagcgggcaaaacaaatggaatttatgccgtttgttccgcacatccgctggtgctggaagctgcaatccgctacgccagtgcaaaccaaacgccgttactgattgaagcaacctccaatcaggtagaccagttcggcggttataccggaatgacgcccgccgattttcgcggctttgtttgtcagctcgccgacagcttgaatttcccgcaggatgcgttgattctgggtggtgaccatctggggccaaaccgctggcaaaacctgccggccgctcaggcaatggccaatgccgatgatttgattaaaagctacgttgcggcaggattcaaaaaaatccaccttgattgcagcatgtcctgtcaggacgatccgattcccttaactgatgacatcgtggctgaacgcgccgcccgtctggcgaaagtggcggaagaaacctgtcttgaacactttggcgaagccgatctggagtatgtcattggtaccgaagtgccggtacctggcggcgcgcatgaaaccttaagcgagctggcggtcaccacgccggatgccgcccgcgccacgctggaagcccatcgtcacgcctttgaaaagcaaggtttgaatgccatctggccacgcatcattgccctggtggttcaacccggcgtcgaattcgatcacaccaacgttattgattatcagcccgccaaagcgagcgccttaagccagatggtcgaaaactacgaaacgctgattttcgaagcgcactctaccgattatcaaacgccgcaaagcctgcgccagctggtgattgaccactttgccattctgaaagttggcccagcgctgaccttcgccctgcgtgaagctctgttctctctggcggcgattgaagaagaactggtgccagcgaaagcctgttctggtctgcgtcaggtgctggaagacgtgatgctcgaccgcccggaatactggcaaagccactaccacggtgacggcaacgcgcgtcgtctggcgcgtggttatagctacagcgatcgcgtgcgctattactggccggacagccagattgatgacgctttcgctcatctggtacgtaatctggcggatagtccaattccgctgccgctgatcagccagtatctgccgctgcagtacgtgaaagttcgctccggcgagctgcagccaacgccacgggaactcattatcaaccatattcaggacatcctggcgcagtaccacacagcctgtgaaggccaataagcaaaacaaagaggaacacgctatgccaaatattgttttaagccggattgatgaacgcttgattcacggtcaggtcggcgttcaatgggtcggatttgcgggggcaaatctggtgctggtagccaacgatgaggttgccgaagatccggtacaacaaaacctgatggaaatggtactggcagaagggatcgccgtacgtttctggacgctgcaaaaagttatcgacaacattcatcgcgccgccgatcgacagaaaatcctgctggtttgtaaaacacccgccgatttcctgacgctggtgaaaggtggcgttccggtgaatcgcattaacgttggcaatatgcactacgccaatggcaaacaacaaatcgccaaaacggtttctgtggatgcgggcgatatcgcagcatttaacgacctgaaaaccgctggggtggaatgcttcgttcagggcgtcccgacagagcctgctgtggacctctttaaattactttgagggattcatcatggaaatcagcctgttgcaggcatttgcgttgggcattatcgcctttatcgctggcctggatatgtttaacggcctaacccatatgcaccgcccggtggtcctcggcccgttggtcgggctggtacttggcgatctgcataccggaattttaaccggcggtacgctggaactggtgtggatggggctggccccgctggcgggcgcacagccgcctaacgtgattatcggtactatcgtcggcacggcgtttgccattactactggcgtgaaacccgatgtcgcagtaggtgtcgccgtacctttcgctgtcgcagtacagatggggattaccttcctgttcagcgtgatgtccggcgtgatgtctcgctgcgacctggcaacaaacccgcgccgcatttgatgctggtgccgacggcctggtgcattgctataacgggatgacaggtttacatcaccgcgaaccgggaatggttggcgcgggattaacggacaagcgcgcctggctggaactgatagccgatggtcatcatgtgcatccggcggcaatgagcctgtgttgttgctgtgcgaaagagagaatcgtactgatcaccgacgcgatgcaggcagctgggatgccggatggtcgctatacgttatgtggtgaagaagtgcagatgcacggtggcgttgtccgtaccgcgtctggtgggctggcgggcagtacgctgtctgttgatgcggcagtgcgcaatatggtcgagttgacgggcgtaacgcctgcggaagccatccatatggcgagcctgcatccggcgcgaatgctgggtgttgatggtgttctgggaagccttaaaccgggcaaacgcgccagcgtcgttgcgctggatagcgggctacatgtgcaacaaatctggattcagggtcaattagctagcttttgatagtttgctcctttattgggccttcacttcccccgtaaggcctttctttttctttcgttttgatctgtgcagcggtgtcggatgcgacgctaacgcgtcttatccgacctacagttggtgaccgcaaggccggataaagcgtttgcgccgcatccagcaatcccttttgcttcctttatcttttctttcaacgatcacaaatttcgttttatttcttttttctccattgaactttcagtttcttttctatagattttaatcaacgaaagacatcaccaagtgaaatgaaacgaaaggcaagtgaaagcgacaacgcccgacgtcaagttcatcagactaaggattgagttatgccagaaaattacacccctgctgccgccgcaaccggtacatggactgaagaagagatccgccatcagcctcgcgcatggatccgtagtctcaccaacatcgacgcgctacgttccgcgctcaataacttccttgaaccgttactgcgcaaagagaatctgcggatcatcctgaccggagccggaacgagcgcatttatcggtgacatcatcgcgccgtggctcgccagccataccggtaaaaacttcagcgccgtaccgaccaccgatctggtcaccaatccgatggactacctgaacccagctcatccgctgctgttgatctccttcggtcgatccggcaacagcccggaaagcgtcgcagccgtggaactggcaaatcaatttgtaccggaatgctatcacctgccgatcacctgcaacgaagcgggcgctctttaccaaaacgcgatcaacagcgataacgcgtttgccctgctgatgcccgcagaaacgcacgatcgcggctttgcgatgaccagcagcattaccaccatgatggccagctgcctcgcggttttcgcacctgagacgatcaacagccaaaccttccgcgacgtggcggatcgttgccaggcgatcctgaccagtctgggcgatttcagcgaaggtgtgtttggttacgcaccgtggaaacggatcgtttatctcggtagcggtggcttacagggcgcagcacgcgagagcgcgctgaaagtgctggaactgacggcgggtaaactggcggccttttatgattctccaaccggattccgtcatggaccaaaaagcctggtcgatgacgaaacgctggtggtggtatttgtctccagccacccttacacccgtcagtatgatcttgatctgctggctgaacttcgccgtgacaaccaggcaatgcgtgtaatcgccatcgccgcggaaagcagcgacatcgtcgctgccggtccacatatcatcctgccaccgagtcgtcactttatcgacgttgagcaggcattttgcttcctgatgtacgcccagacgtttgcactgatgcagagcctgcacatgggcaatacgccggataccccaagtgccagtggcaccgttaaccgcgtggtgcaaggcgtaatcattcatccgtggcaggcataagaggatcgcattatgagcattatctccactaaatatctgttacaggacgcccaggccaatggctacgcggtgcctgcttttaacattcataacgccgagacgatccaagcgatcctcgaagtgtgcagtgaaatgcgaagcccggtgatcctcgccggaacgccggggacctttaaacacatcgcgctggaagagatctacgccctgtgtagcgcctattccacaacctacaacatgccactggcgctgcatctcgaccaccacgaaagcctggatgatattcgccgtaaagtccacgcaggtgtgcgcagtgcgatgatcgacggcagccacttcccgtttgccgagaacgtgaagctggtgaaaagcgttgttgacttctgccacagtcaagattgcagcgtggaagcagaactgggccgcctgggcggtgttgaagatgacatgagcgttgacgccgaaagtgcattcctgaccgatccacaagaagctaaacgctttgtcgaactgactggcgtcgacagcctggcggtagcgattggtacggcgcacggcttatacagcaaaacgccgaagattgatttccagcggctggcggaaattcgtgaagtggtggatgttcctctggtgctgcatggtgccagcgatgttccggatgaatttgtccgtcgcactattgaacttggcgtcacaaaagtgaacgttgccacagaattaaaaatagccttcgctggcgcggttaaagcctggtttgcggaaaatccgcagggtaacgatcctcgttattatatgcgcgtcggaatggatgcgatgaaagaagttgtcagaaataaaattaatgtctgtggtagtgcgaatcgaattagtgcataatcattagttttttatgatttatcccaatgtacttcccgattaatatcggggagtgccttaatggaaaaggagataactaaaccttaataaatacatcactacaatatcgcaacaataatatatttaaaaaaattatattattcaactttatggtgaggattacacaatgaccagtccaaatattctcttaacccgtattgataaccgtctggttcacggtcaggttggcgtgacctggacatccaccatcggtgcaaatctgctggtagtcgtggatgatgttgtcgctaacgatgatattcaacagaaattaatgggtattaccgcggaaacctacggctttggcattcgtttctttactatcgaaaaaaccattaacgtcatcggcaaagctgcaccacatcagaagatcttcctgatttgccgtacgccacaaacggtacgtaaattggtagaaggtggtattgacctgaaagatgtcaacgtcggcaatatgcatttcagcgaagggaaaaagcaaatcagcagtaaagtttatgtcgatgaccaggatctcacggacttacgttttattaaacaacgtggcgtgaatgttttcattcaggacgtccctggcgatcaaaaagaacaaatccctgactaaatctaaaatcgccttaatattggtttgaggtaataaaaatgcatgaaataaccctacttcagggattatccctggcggcgttagtttttgttctggggattgatttttggctggaagccttatttttattccgcccgataatcgtttgtaccctaactggcgctattctcggtgatattcagactggcttaattaccggtggtctgacagagttggctttcgccggattaacccctgcaggtggtgttcagccgcccaacccgattatggcgggtctgatgaccaccgtcattgcatggtctacgggcgttgatgccaaaacagcaattggtcttggcctgccgtttagtttgttaatgcagtacgtcattctgttcttctattccgctttcagtttatttatgaccaaagccgataaatgcgcgaaagaggcggatacggcagcgttttcccggcttaactggacaacgatgctcatcgtcgctagtgcgtatgcggtgattgctttcctctgtacttacctggcacagggggcgatgcaggcgctggtgaaagcgatgcccgcctggctgacccacggctttgaagtggctggcggtattctgcctgccgttggttttggcttgctgctgcgcgtaatgttcaaagcgcaatatatcccttacctgatcgccggtttcctgtttgtttgctacatccaggtcagcaacctgttgccggttgccgtactgggcgcaggctttgcggtgtatgagtttttcaatgcgaaatcccggcagcaagcgcaaccgcagcccgttgccagtaaaaatgaagaagaggactacagcaatgggatctgaaatcagtaaaaaagatatcacccgtctgggctttcgtagcagcctgctgcaagcgagctttaactacgaaaggatgcaggcgggcggttttacctgggcgatgttgccgatcctgaaaaagatttataaggacgacaaaccgggcttaagcgcggcgatgaaagataacctcgaatttattaatacccacccgaatctggtcggattcctgatggggttattaattagcatggaagaaaaaggagaaaaccgcgacaccattaaaggcctcaaagtggcactgtttggcccaatcgccgggattggcgatgcgattttctggtttactttgttgccgattatggcgggaatttgcagtagttttgccagccagggaaacctgctggggccgattctatttttcgccgtttacctgcttatctttttcctgcgcgtcggctggacccacgtcggttatagtgtcggcgtgaaggcgatcgataaagtgcgagagaacagccagatgattgcccgtagcgcaaccatcctcgggatcacggtaatcggcgggctgatcgctagctatgtgcatattaacgtggtgacaagctttgccatcgacaatacccacagcgttgcgctgcagcaggatttcttcgataaagtcttcccgaacattttaccgatggcctacaccctgctgatgtattacttcctgcgggtgaaaaaagcgcatccggtgctgttaatcggcgtgacttttgtgctctctattgtttgttccgcattcggcattttgtaaatggaacgaggcactgcgtctggtggtgcctctttacttaaggaatttcatcctgtgcaaacccttcagcaagttgaaaactatacggcgttaagtgaacgtgccagcgaatatttattggccgtgatccgtagcaaaccgaatgccgtgatttgcctggcgaccggagccacgccattactgacgtatcattatctggtagaaaaaatccaccagcagcaggttgatgtcagccagctcaccttcgtgaagctcgacgaatgggtggatctgccattaacgatgccaggcacctgcgaaactttcctgcaacagcatatcgtgcagccgctggggctacgtgaagaccagctcatcagctttcgctccgaagagataaatgagacagagtgcgaacgggtaacgaacctgattgcgcgcaaaggcggtctggatttatgcgttctcggattggggaaaaacggtcatcttgggctgaacgaaccgggagaaagcctgcaaccggcctgccatatcagtcaacttgatgccagaacacagcaacatgagatgttaaaaaccgcgggtcgccccgtgactcgtgggatcaccttaggcctgaaggatattctcaatgcccgcgaagttttgttactggtgactggcgaaggaaagcaggatgcgacagatcgttttctcacggctaaagtctctaccgctatcccggctagttttttatggctgcacagtaactttatttgtttaattaacacctaaccagatgaaaaatttgctcaaaatgtttaaattaacttatgtaacagtcacgcattatattaaataacatttgactgggttgaacataacgccgatagcaaaaggagttatgttcaacaatttaattttagatatacatataacttgttctattaataaatcacctcgtattctgactcgccccctggcgcagcaaagtcaggcatttatactcttttgaatacatagaaaattgatatcaatataatgaaaatatcaaatatttgcatataaatataatcttaaagttcagtctatttaatgttcaatgaaatatttctgcctgtataatctttaaagatgttgaacatatattcacattaaatatgattatgtacttgttacaaggataaggttatatatgaataaagttacaaaaacagctattgcgggcttacttgcgcttttcgcaggtaatgccgctgcaaccgatggtgaaatagtttttgatggcgagattttaaaatccgcttgtgaaatcaatgactctgataagaaaattgaagttgctcttggtcactataatgccgaacagtttcgtaatattggcgagcgtagcccaaaaattccattcactattcctttagttaactgcccaatgactgggtgggagcacgataacggcaacgttgaagcgtctttccgtctatggctggaaacgcgagataatggcaccgtccctaacttccctaatctggcaaaagtaggctcttttgctggcatagcggcaacaggtgtgggtatccgtattgacgatgcggaaagcggaaacattatgccactgaatgctatgggcaatgataacacggtttatcagatcccggcggaatccaatggtattgtcaatgttgacctcatcgcttactacgtaagtaccgtagttccaagtgaaatcaccccaggggaagcagacgctatcgttaacgtaacgctggattaccgttaatacgttagggcgttatctgacctgtcagataacgcccttttccttcctctttctcgttgtatcaggttgaaaaataactatgagtaaacgaacattcgcggtgatattaaccttgttgtgtagcttctgtattggccaggcgcttgcaggaggaatcgttttacagcgaacgcgagtgatctatgatgccagccgcaaagaggctgcgttacctgtcgcaaacaaaggcgcagaaacgccttatttactgcaaagttgggtagataatatagatggtaaaagccgtgccccatttattataaccccaccgctatttcgtcttgaggctggcgatgacagtagtctgcgaattattaaaacagctgataacctgcctgaaaataaagagagcctgttctacattaatgttcgtgccattccagcaaagaaaaaaagtgatgatgttaatgctaacgagttgacgctggtatttaaaacacggatcaaaatgttttatcgccccgcacacctgaagggacgggtaaacgatgcgtggaaaagtctggaatttaaacgtagtgaccatagtctcaatatatataacccaactgaatattacgtcgtatttgccggactggcagtcgataaaaccgatctcacaagcaaaattgaatatatcgcgcccggagaacataaacagttaccacttcctgcatctggcggaaagaacgtgaaatgggctgcgatcaatgattatggcggcagttccgggacagaaactcgtccactgcaataaaaaatataaaaacacaggtcatcagggaatgccacaacgacaccaccagggacataaacgcacaccgaaacagttggcgctcatcatcaaacgttgtttgccgatggtgctcactggcagcggcatgctttgcactaccgctaacgccgaagagtattatttcgaccccattatgctggaaaccacaaaaagtggtatgcaaacaaccgatctgagccgttttagtaaaaaatatgcacaactaccaggaacttatcaggttgatatctggctgaataaaaagaaggttagtcagaaaaaaattacatttaccgccaatgcagagcaacttctgcagccacagtttacggtagaacaactacgtgagctgggtattaaggtggatgaaatcccggcgctggctgaaaaagatgacgatagcgtgatcaacagccttgaacaaatcattcccggtacagctgctgaatttgatttcaatcatcagcaacttaatttgagcattccccaaattgcactgtaccgtgatgcaagaggttacgtctccccttctcgttgggacgatggtataccaacgctgtttaccaactacagctttacaggttctgataaccgttaccgccagggcaatcgtagccaacgacagtacctgaatatgcaaaatggtgctaattttggcccctggcgattacgcaactattccacatggacacgcaacgatcagacaagtagctggaataccatcagtagttatttacaacgtgatatcaaggcgttgaagtctcagttgcttctgggagaaagcgccaccagcggcagtattttttccagctacacctttactggcgtgcaactcgcttccgacgataatatgttgccaaacagccagcgcggatttgccccaacggtacgcggtatcgcaaacagtagtgcaatcgtgactatcaggcaaaatggttatgtgatctatcaaagcaacgtgagtgcgggtgcctttgaaattaacgatctctacccctcttccaacagcggcgatttagaagtcacgattgaagaaagtgacggtacacaacgtcgctttatccagccttattctagtttacccatgatgcagcgacctgggcatctaaagtatagcgcgaccgctggacgctatcgcgctgatgcaaacagtgatagcaaggaacccgaatttgctgaagccacggcaatatatggtttgaataatacttttacgctgtatggcggcctgctcggttctgaagattattatgcgctggggatcggtatcggcggcacacttggcgcactgggcgcgttgagcatggatatcaacagagctgacacccaattcgataaccagcactcttttcatggctatcaatggcgtacgcagtacatcaaagatatcccggaaaccaacaccaatatcgctgtcagctactatcgctataccaacgatggctattttagttttaatgaagccaatacccgcaattgggactataacagtcgccaaaaaagtgaaattcaattcaacatcagccagacaatatttgatggggtaagtctgtatgcctccggtagccagcaagactattggggcaataacgataaaaacaggaatatctctgttggggtttccggccagcaatggggagttggttacagcctgaattatcaatacagccgctacactgatcaaaataatgaccgcgcactctctttgaatctcagtattccgttagaacgctggttaccgcgtagccgggtttcctatcagatgaccagccagaaagatcgcccaacccaacatgaaatgcgtcttgatggcagtctgctggatgatggtcgcctgagctatagcctggaacaaagtctggatgacgataacaaccataacagtagcctgaacgccagttaccgtagtccttatggcaccttcagtgccggatacagctacggtaatgacagcagccaatacaattacggcgttaccggcggcgtggttatccatcctcatggcgtgacgctcagccaatatctgggcaacgcttttgcgcttatcgatgctaacggagcatctggcgtgaggatacaaaactatccggggattgctaccgatccttttggctatgcagtggttccttatctcacaacttatcaggaaaaccgtctcagcgtagatactacgcagctgcccgataacgtcgatcttgaacaaacaacacagtttgtggtgcccaacagaggtgcaatggtagcggcgcgtttcaacgccaatatcggttatcgcgtacttgttacagtcagcgatcgcaacggtaaaccgttgccctttggcgctcttgccagcaacgatgatacggggcaacaaagtatcgtcgatgagggcggcatactatatctctctgggataagcagtaaaagtcaaagctggactgtacgctggggaaatcaggcagatcaacaatgtcagtttgctttcagtacaccggatagtgaacctacaacctctgtattacaaggcacagcgcagtgccattaaggataaaaaaatgaaaagagcgcctcttataacaggtcttttgttgatatccacatcctgcgcttatgcctccagtggagggtgtggagccgacagcactagcggtgcgacaaattacagcagtgtggttgatgatgttacggtgaaccagacagataacgtgacaggacgggagtttacctctgcaacgctaagtagcactaactggcaatacgcctgttcctgctctgcgggtaaggcagttaaacttgtctatatggtcagccccgtacttaccaccactggacatcagacaggatattacaaactcaatgacagcctggatattaaaaccacattacaggcaaacgacattccaggactcacaaccgaccaggttgtctctgttaacacccgattcacacagataaaaaacaacacggtatattctgctgcaacccaaacgggtgtttgccagggtgatacgtctcgttatggacccgttaatattggtgcgaacaccacctttaccctgtatgtcaccaagccatttctcggcagcatgaccattccgaaaacggatattgccgtcattaaaggcgcgtgggtcgatggaatgggaagcccgtctacaggtgacttccatgatttagtcaagttaagcattcagggaaatctcaccgccccacagagctgcaaaattaatcagggcgatgttattaaggttaattttggattcatcaatggtcagaagtttaccacccgcaatgccatgccagacggttttactccagtagactttgatatcacttatgactgtggtgatactagtaagattaaaaacagcttgcaaatgcgcatcgacggtacaactggggtagtagaccagtacaacctggtcgccaggcgaagaagtagtgacaatgtgcccgatgtcggtattcgtattgaaaatctcggcggcggagttgcaaatattccttttcagaacggtatccttcccgttgatccttccgggcatggcaccgtcaatatgcgcgcctggccagttaatctggtcggtggtgagctggaaacaggaaaatttcagggcacagccaccattaccgtcatcgtgcggtaaaagaagacgttgcgttttgattaacgcaacgcttcggcactgttacccctgctgctccagcgcatacttatacagcgcatttttcttcacgccgtgaatttctgcggccagcgccgccgcttttttcagcggcagttctgcctgtagcagcgccagcgtgcgcagggcatcggcgggtaagtcttcttcctgtgctttatgaccttcgacaatcagcaccatttcgcctttgcgacggttttcatcttcctttacccacgccagcagctcgccaacgggcgcgccgtgaatggtttcccaggttttggtcagctcacgcgccagaaccacgtagcgggattcgcctaataccgcaacgatatcttccaggctatctaacagacggtgggtagattcataaaaaatcagcgtgcgcggctccgcttcaatggcttttagcgcatcacggcggcctttacttttggcaggtaaaaagccttcgtaacagaaacggtcagagggtaaacccgctgcgcttaacgcagtgatagcagcacacggcccgggtagcggcaccacgcggatccccgcttcacggcaggtacgcaccagatggtagccaggatcgttaattagcggcgttccggcatcggaaaccagcgcaatgttttgcccctcttgcagcttcgccagcagcgtttcagctttttgttgttcgttatggtcgtgcagcgcaaacaaccgggcattaatcccaaaatgttgcagcaataaaccggtgtgacgagtatcctcggcggcaatcagatcaacggcctgtaatacctctaacgcacgctgggtgatatccgccagattgccgattggcgtcggtacaatgtaaagctggccctgagaattatccgcgctttggtgttgtttcattgtgtcgtccgtattgccgatttaatattgagcattgcgtaaaaaaaatatcactggatacattatggtacccagtacattttctcgtttgaaagccgcgcgttgtctgcctgttgttctggcagccctgattttcgccggttgtggcacccatactcccgatcagtccactgcttatatgcagggcacggcgcaggctgattctgccttttatcttcagcagatgcagcaaagctctgatgataccaggatcaactggcaattactcgccattcgtgcactggtgaaagaaggtaaaaccgggcaggcggttgagttgtttaaccaactaccgcaagaactgaacgatgctcagcgtcgcgagaaaacactgctggcggtagagattaaactggcgcagaaagattttgctggcgcgcaaaacttgctggcgaaaatcacacctgccgatttagaacaaaaccagcaagcgcgttactggcaggcaaaaatcgatgccagccaggggcgtccttccattgatttactgcgcgcgttaattgctcaggaaccgctgcttggcgcgaaagaaaaacagcagaatattgatgccacctggcaggcgctctcctccatgactcaggaacaggcgaatacgctggtgatcaacgccgacgaaaatattctgcaaggctggctggatctgcagcgcgtctggtttgataaccgtaacgatcccgacatgatgaaagccgggatcgccgactggcagaaacgttatccgaacaatccgggcgcgaaaatgctgccaacgcagttggttaacgtaaaagcgtttaaaccagccagcaccaacaaaatcgccctgctgttgccactgaatggccaggcagcggtatttggtcgcactattcagcaaggctttgaagcggcgaaaaatatcggcactcagccagtggcagctcaggtagctgccgcacctgccgcagacgtagctgaacaacctcagccgcaaaccgtggatggcgttgccagcccggcacaagccagcgttagcgatctgaccggtgaacagcctgcagcccagccggtgcctgtaagcgccccggcgacaagcaccgcagcggtaagcgcacccgcaaatccatccgcagagctgaaaatctacgataccagtagtcaaccacttagccagatcttaagccaggttcagcaggatggcgcgagtattgtggtcggtccgttgctgaaaaataacgttgaagagttgctgaagagcaacactccgctgaacgtactggcactgaaccagccggagaatatcgaaaatcgcgtcaatatttgttacttcgcgcttagtccggaagacgaagcgcgcgatgcagcgcgtcatattcgtgaccagggtaaacaagcgccgctggtgctgatcccacgcagtagtttgggcgatcgcgtagccaatgcgtttgcgcaagagtggcagaaactgggcggcggcaccgttctgcaacaaaaatttggttccaccagcgaattacgcgcgggtgttaacggcggttctggtattgctttaacgggtagcccgattactctcagagcgacaaccgactccggcatgacgaccaacaatccaacgctgcaaaccacgccaaccgatgaccagttcaccaataatggcggtcgtgtcgatgcggtgtacattgtggcaacgccgggtgaaatcgcttttatcaaaccgatgatcgccatgcgtaacggtagccagagcggtgcaacgctgtacgccagctcccgcagtgcgcaagggaccgctggcccggatttccgactggagatggaaggcttgcagtacagcgaaatcccgatgctggcaggcggtaatctaccgttaatgcagcaggcactcagcgcggtgaataacgattatagtctggctcgcatgtatgcgatgggcgtcgatgcctggagcctggcaaatcatttcagtcaaatgcgccaggttcagggttttgaaatcaacggtaataccggaagcctgacggctaacccggattgcgtgattaacaggaacttaagttggctacagtaccaacaaggtcaggtagtccccgtcagttaaattaagtgattaacaggaacttatcatggctacagtaccaacaaggagtggtagtccccgtcagttaaccaccaaacagaccggcgatgcgtgggaagcacaagcgcgtcgctggctggaaggcaaaggactgcggtttatcgccgctaacgtgaacgagcgtggcggcgagatcgatctgataatgcgtgaaggccggaccaccatttttgtcgaggtacgctatcgccgctctgcgctttatggcggcgcggcagccagtgtgacccgcagcaaacaacacaaattattacagactgcccgcttgtggctcgcgcgtcataatgggagttttgatactgtggattgccggttcgatgtggtagccttcaccgggaatgaggttgagtggattaaggatgcctttaatgaccacagttaattaaggtttaaggattagcgtgcaagaaagaattaaagcttgcttcactgaaagcattcaaactcaaattgcggcggcagaggcgcttccggatgccatctcccgtgcagccatgacgctggttcagtctctgctcaatggcaacaaaatcctctgttgtggtaatggaacttccgctgccaatgcacagcattttgctgccagcatgatcaaccgtttcgaaacggagcggcccagcttacctgccattgcactaaatactgataatgttgtcttaacggcgattgccaacgatcgcttacatgatgaagtgtatgcaaaacaggtgcgggcgctgggtcatgcgggagatgtattgttagccatttccacccgtggcaacagccgcgatattgttaaagcagttgaagccgccgttacgcgtgatatgaccattgtggcattgaccggctatgacggcggcgaacttgcaggtttgttagggccacaggatgtggagatccgcattcctagccatcgtagtgctcgcattcaggaaatgcatatgctgacggtaaattgcctgtgcgatctgatcgataacacgcttttccctcaccaggatgattaaggagaatacatgaaggcattaagcccaatcgcagtccttatttccgcgctgctgttgcaaggttgtgttgccgctgccgtagtgggtaccgctgctgtgggtaccaaagccgcaactgacccacgcagtgtcggcacccaggtggacgatggtaccctggaagtgcgcgtgaacagcgcattgagcaaagacgaacagattaagaaagaagcgcgcattaatgtaacggcctatcagggcaaagtgctgctggttgggcagagtccaaatgctgaacttagcgctcgcgccaaacagattgctatgggcgtagacggtgccaacgaagtgtataacgagattcgtcagggccagccgattggtctgggcgaagcatctaacgatacgtggatcaccaccaaagtgcgtagccagctcttaaccagcgacctggtgaaaagctccaacgtgaaagtgaccaccgaaaacggtgaagtgttcctgatggggctggtgactgaacgtgaagcgaaagcggcggcagatattgccagccgggtgagcggcgtgaagcgggtaactacggcgtttacgtttattaaataacagccccttgtaatgcctgatgcgacgcttgccgcgtcttatcaggcctacaacgatacaaaccgtaggtcagataaggcgtttacgccgcatccgacatgttttccctcaaatcagaacaacagcgccagcccgccgacaatcacaccagacactgccaccatcgcccctgtcagccataaggctttcgccgggaacgctttgcgcagcataatcagactcggcaaactcactgccgggagcgtcatcaacaatgccagcgccggagcggttcccatacctgccagcatcatcgtttgtacaatcggaatttctgctgccgtgggaatgacaaacaagcatcctgctaccgccatcgccaccacccacatcaggctgttatcgacagcaccatcggcatgggggaataaccagacgcgagcggcacccaacaccagtactgcaaggatgtaaaccgggatcgtactccagaaaagcgtccatagcgccctgccccagcggctaaaaaacccgccctgtgcttccggtatgtcaatttcgaccggtgcctgcgtttgcggtgtttcacgcacccatttttgcaccagcgtcgcaatcagcaacaccatcaccagcccggccaccagacgaatcgccgcaaaaccccagccgaggacaaagcccataaacaccagcgtcgccgggtttaacaccggattgcccatccagaatgccagcgcaccgcccatgctcacctgttggcgacgcattcccgccgcgaccggagccgcacagcaggtacacatcatgcccggcaagctaaacagcgttcccagcagcgtgccgcgaaagcggctttgcccaagcgtacgcaacaaccagtcacgcgggatcagcacctgaatcaagctaccgaggatcacccccagcaccgccgctttccataccgcgaggaaatagatcatcgcgtaatccaacgccgcctgccatgggttagcatccgcctgcgcaaggatagatttaccgatactgtgggtttcggcagcagtaaacgctttgccgtagtaaggttcccatttcacataccagagaccggcaatgacaacgagaaagaaaagcgcgggtttccaccactgaatgggcgttgccgcctgagaactagactgaccagtcatagcattccccaggaataagttatgataattgagcgcgtgaatattacgctcactatcaattcttgggaataattattcagctcttttgcgtaattcactagagcttaaaatcgtcacgccttcatgctcaggccgcatgctctctgccagcatgacccgcgccacgtctctcgcatcaatggatttccagttacctggtaacaaacggaacagcggcgcaaaaagcgtttcgttcatccgctgtttgctacgatcgcccagtaacatgctcgggcgagcaatggtcaatttcggccagttctgggcgattaatgcttcttccatctcccctttgacgcggttatagaaaaacgggctgtgggcattggcacccatcgcactgactaccaacatatgctgcgcgcccagtcgccgcccggttaatgcggtatccactaccagcgtgtaatcggcatgaataaacgcctctttgctccccgcttctcgccgcgtggtgccgagacaacaaaacacaatgtcgatgggatcggtgacctgcgccaacgcgtcactcagttgcggatcatggggattaaacaccccgggcatatcgcccaacggacgtcgcgtcggcgcagcaatggcgttaactttcggttcgttaatcaacatccgcagcaggtgaccgcccaccagccccgttgcgcctgtaatcagtacctgactcatcttcgctcctttacagaattgtctgccttgcgctccacggctcatgcaccaggcttaatagaccatgaggtaattatccccgattgtgggaaattcgcctcatccaatgcaacaacgcggaggaagcatgagtaagaaaattgccgttttaatcactgatgaatttgaggatagtgaatttactagtcccgcagacgagttccgtaaagccggacacgaagtgattaccattgaaaaacaagcgggtaaaacggtgaaaggcaaaaaaggagaagccagcgtgaccatcgataaatccatcgatgaagtgacgcctgcggagtttgatgccctgctgctaccgggcggccatagtccggattatctgcgtggggacaaccgttttgtcacctttacccgtgattttgtgaatagtggcaaaccggtgtttgccatctgtcacggcccgcagttgctgatcagcgccgatgtgattcgggggcgcaaactgaccgcagttaaaccgatcattattgatgttaaaaatgcgggcgcggaattttacgatcaggaagtcgtggttgataaagatcagctggttaccagccggacaccggacgatctgccagcgtttaaccgcgaggcgttacgcctgctcggtgcctgattacgcctgctcggtgccactgtcgcgtagccaaatcatttttttaccaaagcccagcgtgttgtcggtgaatttgatttcatcgagccggatttcccacaccggggcgctcagcattctggcaaccggaaagcgacgattgtacgccttgcgcgcgaggtcgctttcctcaccttccagcctgcggatctcacctttaaactgcacaccgcgaattaacgctaccgttttcggctgaccgtttaccgttccggcaaccgcagcctgcggcccactcatctgcgcgtggcgcgttttttcttccgtcaaaatgtagaaggcgactttctgcgcatcaaaaagataaaaggcattagcgcaccagagttccccttcctgctgcacacaccaagtgacaacatgttgttttgccagccaacggctgatggcgatgagtgtttccattgctgttctcttttatactgtgggcctgaccttaacatgcgacgcagacgatgacaccctggtttctttacttgatccgtaccgccgacaataagctttataccgggatcaccacggatgtcgaacgccgctatcagcagcaccaaagcggcaaaggggcgaaagcactgcgcgggaaaggagaactaacgctggtgttttccgcgccagtgggcgatcgtagcctggcgttacgggcggaatatcgcgttaagcaactgaccaaacggcaaaaagagcgtctggtagcggaaggcgcagggtttgcagagctgttaagcagtctgcaaaccccggagattaaaagcgattgaaatgctcgtgatactcaaccaggccggtaacgccattcagcgcgtcatccgctaaacgatgtacctggaaggcgctttcagtgcccggccagcggcaacgcagatcgtgatgcgccgccagttcaaagccgaaacgactgtacagcgccggatcgcccagcgtcaccactgcggcatagccgaactcattaaggctatcgagtccttcatagaccagttggcgtgccagcccctgtccacggtatttttcatcaaccgccaacggtgccatgccgacccattgcaggtcttcgccctgcacatcaaccggactaaatgccacatagccaatgacctgaccttcgtcatctgtcgccaccagccccagcgtcagaaagccatcttcacgcagatcgtgaaccagcttcgcttccgcatcactttcgaaactgcgacgcagcagggcatcaatacccggcgcatcaatgggaatttctactcgaattagcatggttcacctacgcttgtctgtttggtttcaggcgcggttttcattcccgcctcaacaaaatccgccagttgcagcagcatcatgcgtaaggctttcggcatttgctccagttcaatggcgtccatcaggtttttcacatacagccccagctccgtatcgccttcaatcaccagccgacgctggaagaagagcgtatccggatcttgtttacgcgccgcaatcatcagcagatcgctggcgtcggcactaaaactcacatcagcttgcgcgttctggctaacgaccagtttgccattcaccacgctggtaaaccattgcaggtcaatatcacgcacatgaatacttaaccagcggccttcaagaaactccagctcgccatcatccagcgcctggcggaattgccagcttaagacctgctcaagaacctggcgttttagcgcaaatggcgtcagttttaccggtacactcaacagagatggccccaaatgcacaatacgggaacgcagtttatccaacacgagttttactccctgtttcaacaatcatcctattttgccatatcagaaaaataacatagcggtataaatcaacaattccatatgaaattgctgctaccaccaatacaactttaactgccttaaatcaaaaattgtcgcagcaaggttaactaaaatcccagttcgttaacatttttgcgttttgatagcgcaaccttcaggaaaaattatggagctgctctgccctgccggaaatctcccggcgcttaaggcggccatcgaaaacggcgcagatgctgtttatatcgggctaaaagatgataccaatgcccgtcacttcgccggccttaactttaccgagaaaaaattgcaggaagcggtgagttttgtccatcaacatcgccgcaaacttcacatcgcgattaacacttttgcgcatccggacggttacgcccgttggcagcgcgccgtggatatggcggcgcagctgggtgccgacgcgctgatcctcgccgacctcgccatgctggagtacgccgccgagcgttatccgcatattgagcgccacgtaagcgtgcaggctagcgcgaccaatgaagaggcgattaacttttatcatcgccattttgacgttgctcgcgtggtgctgccgcgcgtgttgagcattcatcaggtgaaacaactggcacgggtcacacctgtaccactggaagtctttgctttcggcagcctgtgcattatgagcgaaggtcgttgctatctgagcagctatctgacgggtgagagccccaacaccataggcgcgtgttctccggcccgtttcgtgcgctggcaacaaacgccgcaggggctggaatcccgcctgaacgaagtgctgatcgaccgttatcaggacggcgaaaacgcaggttatccgacgctatgtaaagggcgttatctggtggacggcgagcgctatcacgcgctggaagaaccaaccagtctcaataccctggaactgctgccggagttaatggcggcgaatattgctagcgtgaaaattgaaggccgccagcgtagcccggcgtatgtcagccaggtggcgaaagtctggcgtcaggctatcgaccgttgtaaggccgatccgcaaaactttgtaccgcaaagcgcgtggatggagacgctcgggagcatgtccgaaggcacgcaaaccactcttggcgcatatcaccgtaaatggcagtgagaaaagcaatgaaatattccttagggccagtgctgtggtactggccaaaagagacgctggaagaattttatcagcaggccgccaccagcagcgccgacgtgatttatcttggtgaagcggtatgcagcaagcgtcgggcaaccaaagttggcgactggctggagatggcaaaaagcctcgccgggagtggtaagcagattgtgctctccacgctggcgctggtgcaggcaagttctgaactgggcgaactgaaacgctatgttgagaacggtgagtttctgattgaagccagcgatctcggcgtggtgaatatgtgcgctgaacgcaaactgccgttcgtcgccgggcacgcgctgaactgctacaacgcggtgacactgaaaatattgctcaaacagggcatgatgcgctggtgtatgccagtggagctttcccgcgactggctggtgaatctgcttaatcagtgcgatgagctgggcattcgtaaccagtttgaagtggaagtcctgagctacggtcatctgccgctggcctactccgcccgctgctttaccgcgcgtagcgaagaccgcccgaaagatgagtgtgaaacctgctgcattaagtatccgaacgggcgcaacgtgctgagccaggaaaaccaacaagtgtttgtactcaatggcattcagaccatgagcggctacgtttacaacctcggtaacgagctggcatccatgcagggcctggttgatgtggtccgcctgagtccgcagggtactgacactttcgcgatgctcgacgccttccgcgctaatgaaaatggcgctgcaccactgccgttgacggcgaacagcgactgtaacggctactggcggcggctggcaggactggagctgcaagcctaagtaaatagctcactttgttaacaactttaactactctttaatgcagtattaaagattaatcggtaacaaagtgagctgttatgactgataaaaccattgcgtttagcctactcgatctggcccccattcccgaaggttctagtgcgcgagaagcattctcccactctctcgatctcgcccgtctggctgaaaagcgcggctatcatcgctactggctggcagaacaccacaatatgactggcattgccagtgctgccacgagcgtattgatcggctatctggcggcgaataccaccacgctgcatctggggtctggcggcgtgatgttgcctaaccacagtccgttggtcattgcagaacagttcggcacgcttaatacactctatccggggcgaatcgatttggggctgggtcgtgctccgggtagtgaccaacggacaatgatggcgctacgtcgtcatatgagcggcgatattgataatttcccccgcgatgtggcggagctggtggactggtttgacgcccgcgatcccaatccgcatgtgcgcccggtaccaggctatggcgagaaaatccccgtgtggttgttaggctccagcctttacagcgcgcaactggcggcgcagcttggtctgccgtttgcgtttgccagtcacttcgcgccggatatgctgttccaggcgctgcatctttatcgcagcaacttcaaaccgagtgcacggctggaaaaaccatacgcgatggtgtgcatcaatattatcgccgccgacagcaaccgcgacgctgaatttctgtttaccagtatgcagcaagcctttgtgaagctgcgccgtggcgaaaccgggcaactgccgccgccgattcaaaatatggatcagttctggagtccgtctgagcagtatggcgtgcagcaggcgctgagtatgagcttggtaggtgataaagcgaaagtgcgtcatggcttgcagagcatcctgcgcgaaaccgacgccgatgagattatggtcaacgggcagattttcgaccaccaggcgcggctgcatagctttgagctggcgatggatgttaaggaagagttgttgggataatgtgtcttaacgcgggaagccttatccgagctggcaacgctgtcctacatagacctgataagcgaagcgcatcaggcattgtgtaggcagcagaaatgtcggataaggcaccgctgattactgatacaccggcagtaaattaaagctgcttaaaatatgcaccagtgcgttgccgacgccaaacaccagaatcagcgcaatcatcggcttgccaccccagacgcggaatttcgggctgccaaagcgtttacggcttgcacgggctaacagcgccggaacaattgccgcccagatggtagccgctaaaccagcataaccaatggcgtacaggaatccgttcgggaacaacagcccccccacaactggcggggcaaaggtcagcaatgccgttttcaagcggcccacagcgctgtcgtcgaaaccaaacagatctgccagatagtcaaacaaacccagcgttacgccgaggaagctactcgctaccgcaaagttactgaacacgaccagcagcagatccagactacggctgttcagtacgccgcttaacgcctgtaccagcacatcaatattaccgcccttctctgcaataccgataaactccggacgcgggatgttacccatcgtcgccagcaaccagatggtatacagcgccagcgccatcagcgtaccgtacaccagatatttcacgatggttttcggatctttgccgtaatacttcatcaggcttggcacgttaccgtgataaccaaagcttgccagacagaacggcagggtcatcaacagatacggtgcataagacgcattgctttcggcgacgttgaacaatgtcgcaggctgcacatgccccagcaggctaccaaaggtgaggaagaaggtaatgactttcgcccccagcacaatcgctgtcatgcgactgacggctttagtgctcaaccacaccacaaacgctaccagcaatgcaaaaccaaaacccgccgcccgtgccgggacgtttagactcatctctgcgaaggtgtgatgcagaatgctaccactggcagaaatataggcataggtcaggatatagagcacaaaggcaatggaaatgccgttgaccacgttccagcctttgcccagcaaatctttggtgatggtgtcaaaactgctaccgattctgtaattcaggttagcttccagaatcatcaagccggaatgcagcatacagaaccaggtaaagatcagcgccgccatactccagaaaaaccacgccccggacatgaccactggcagagaaaacatccctgcgccaataatggtgccgccgataatcaccacgccgccaagcaggctcggactcgtttgggtggtggttagtgttgccatgagggcttctctccagtgaaaaatagtgcgactgcgttgttatgcattgcactgtaccagtacacgagtacaaaagacagaaaaaaagccccgatggtaaaaatcggggctgtatatattattttacagattgtgttcgctgttcagcgatgattacgcatcaccaccgaaacgacgacgaccggtagaatcatcacgacgcggagcgcggccttcacgacgttcgccgctaaaacgacgaccatcaccacggccaccttcacggcgttcaccgctgaagttacgaccgccttcacgacgttcgccaccgaaaccacgaccaccgccacgacgctcaccgccagtatgcggctgtgcatcgcccagtaactgcatgttcatcggcttgttgagaatgcgagtgcgcgtaaagtgttgcagcacttcacccggcatacctttcggcagttcgatggtggagtgagaagcaaacagcttgatgttaccaatgtaacggctgctgatgtcgccttcgttagcaatcgcaccaacgatatgacgaacttcaacaccatcatcgcggcccacttcaatgcggtacagctgcatatcgccaacatcacgacgttcacgacgcggacgatcttcacggtcaccacgcgggccacggtcgttacgatcgcgcggaccacggtcatcacggtcacggaattcacgtttcggacgcatcggcgcatctggcggtacgatcagagtacgttcaccctgtgccattttcagcagtgccgcagccagagtttcgagatccagctcttcaccttcagcagtcggctgaattttgctcagcagtgcgcggtattgatccagatcgctgctttccagctgctgctgtactttagcggcgaatttttccagacggcgtttgcctagcagttctgcgttcggcagttctacttccggaatagtcagcttcatagtacgttcaatgttgcgcagcagacgacgctcgcggttctcaacgaacagcagcgcgcggccagcacgacccgcacgaccggtacgaccgatacggtgaacgtaagactcagaatccatcgggatatcgtagttaactaccaggctgatacgctcaacgtccaggccacgggctgcaacgtcggtcgcaatcaggatgtccagacgaccatctttcaggcgttccagtgtctgttcacgcagcgcctggttcatgtcaccgttcagcgcggcgctgttgtagccgttacgctcaagagcttcagccacttccagagtcgcgtttttggtacgaacgaagataatcgccgcatcaaaatcttccgcttccaggaaacgtaccagtgcttcgtttttgcgcataccccagacagtccagtagctctggctgatgtcaggacgggtagtcacgctggactgaatgcgcacttcctgcggctctttcataaagcggcgggtaatgcgacgaatcgcttccggcatggttgcagagaacagagcggtctgatgaccttccgggatctgcgccataatggtttcaacgtcttcgatgaagcccatgcgcagcatttcgtcagcttcatccagaaccagaccgctcagtttagagaggtccagagtgccacgtttcaggtggtccagcagacggcccggagtaccgacaacgatctgcggcccctgacgcagggcgcgtaattgcacgtcataacgctggccgccgtacagagcaaccacatttacgccgcgcatgtgtttagagaaatccgtcattgcttcagcaacctgtaccgccagttcgcgggtcggtgccagcaccagaatctgtggtgctttcagctcaggatcaagattctgcaacagaggtaaagagaatgctgcagtttttccgctccccgtctgggccatacccagaacgtcgcggccattcagcagatgtggaatacactctgcctgaattggagatggtttttcgtaacccagatcgttaagggcttcaaggataggagccttcaggcccagatctgcaaaagtggtttcgaattcagccatgtagtacgtgtgcctcaaaattaatggcggccagtctacataactcatcatgaaattgatcagcaattttcattgaaaagtgtgaaccggctcaaagtaggtgtattaacgaacaacaacgccctcacccgttaaggtgatggcaatcaaaaaagattacgggctgatgtgtacgtcagttattgctggtcgctttctgccaggtcatcttggtcctggcccaggaggcttaattccaacaatgcgtatcggtgctcaacaaagttatgaacgttgttggcaaccgccagtttgaacagtgccgtggcgctgtccaaatcccccagacttaggtagtacttacctaaatagaagttggtttcactgagatgctcagcgaggctggtgttatccgttgcgtccgccttgagcctttccattaacgtttgttcgctaatgttgcccaggtagaactcgacaatgttccatccccactgttccttatcgcttttttcgaagtgctgtttcaacacttctttagcctgcttctcatcgagcttctgctcggcgagataaagccacagactacggaaaggatcattgggatcgtcttgataaaacgccagcagatcatcttgcgctaacttgtcacgaccgccgtaatataatgcgatcccgcgattcaagtgcgcgtagttgtaagttggatcaagctcaagtacagaatcaaacgcttcataggcagcatcaaaattgcctgcctgcgttaaatatatgcctaagtaattgaatacttcaggcatatccggtcggattgccagcgcttggctaaaatcgttacgcgctaatgccctcagaccgagactatcatacaacactccgcgctcatataaaagctgtgcgcgttcgtcatcggttaaagcccgactggcaaggatttgttccatacgtgccagaatcacttcctgctgtaaagtcggttgcaatggtaccgcgaggacttcacttttacgccaggaagtattactgcatcctgcaagcgtaagtgctgtcgcaacgaaacaccagcgcaaaaaaggcttcatttcccactcccgaagaccacggttgaatgaacgtcctgttcccggttgctaacaaggcgtcctgcccggttaaaagccccccgccgcagcggagggcaaatggcaaccttactcgccctgttcagcagccggagcttccggtgctgcagcaggttgagactgctcagtcgcttctttaatgctcagacggatacggccctggcgatcaacttccagaactttcaccggtacttcctgacccatctgcaggtaatcggtcactttctcaacgcgtttgtcagcgatttgagagatgtggaccagaccttctttaccgccgccgatggcaacaaatgcgccaaagtcaacgatacgggtcactttaccagtgtagacgcggcccacttcgatttctgcagtgatctcttcgatacgacgaatagcatgtttcgctttctcgccgtcggtcgctgcaatcttcacagtaccgtcatcttcgatttcgatggtggtgccagtttcttcggtcagagcacggattacagaaccgcctttaccgataacatctttgatcttgtccgggttgatcttgatggtatggatacgcggtgcgaactcagagatatcgccacgcggcgcgttgatcgcctgttccattacgcccaggatatgcagacgcgcacctttagcctggttcagcgcaacctgcatgatctctttggtgataccttcaattttgatatccatctgcagtgcagagataccgtcgcgggaacctgcaactttgaagtccatatcgcccaggtgatcttcgtcgcccaaaatgtcagacagtacaacgtagttgtcgccttctttcaccagacccattgcgatacccgcaacggcagctttgatcggcacacctgcgtccatcagcgccagagacgcgccgcacacggaagccatagaagaggaaccgttggattcagtgatttcagacacaacacgtacggtgtacgggaatttgtccatatccggcatgactgccagcacgccgcgcttcgccagacgaccgtgaccaatttcacgacgcttcggagaaccgaccatgccggtttcgcctacggagtacggagggaagttgtagtggaacaggaaggtatcggtacgttcgcccatcagttcatcaagaacctgcgcgtcacgagcagtacccagcgttgcggtaaccagcgcctgcgtttcaccacgggtgaacagcgcagaaccgtgagtacgcggcagcacgccagtacgcacatccagaccacggatcatatctttttcacgaccgtcgatacgcggttcgcctgccagtacgcggctacgaacaacgtttttctcgatcgcgtgcagaatttcacccagttcgttttcgtccagggtttcgtcttcagcaagcagcgtcgcgatggtttcagatttgatgacatcaacctgcgcataacgctcttgtttgtcggtgatgcggtaagcatcgctcaggcgagcttcagccagtgcagcaacgcgcgcgtttagcgcttcgtttaccggctccggctgccagtcccaacgcggtttaccggcttctttcaccagttcattgatgttctgaataacaacctgctgttgttcatgaccgaacactactgcgcccagcatctggtcttcgctcagcagttgagcttcagattcaaccatcagtacagcggcttcagtaccggcaacaaccagatccagtttgctctctttcagctcgtcctgagtcgggttcagtacgtactggtcattgatgtaacctacgcgggcagcaccaatcgggccattgaacggaataccagacagagacagcgctgcggaagcaccaatcatcgcgacgatatccgggttaacttgcgggttaacagaaaccacggtggcgataacctgaacttcgttgacgaagccttccgggaacagcgggcgaatcgggcggtcaatcagacgcgcgatcagggtttcgccttcgcttgggcggccttcacgacggaagaagctacccgggatacgaccagcagcgtaggtacgctcctgatagttaacggtcagtgggaagaagtcctgacctggtttggcttttttctggccaacaacggtaacgaataccgcggtgtcatccatgctaaccataacagcggcagtagcctgacgagccatcatgccggtttccagagtcacggtgtgttggccgtactggaatttacgaacgatcggattaagcaatgtaatatcctttctctttcttagacagtaccttacggcactggtgttaataccgcttcttctgcgcatcctcgcgactaatgacaaccctaacccagctctatgtgggtaaagcctctcattagccgcgcgaacctctgcaacggaagatcattcatagcaacaatacattagtttccagtgaattgctgccgtcagcttgaaaaaaggggccactcaggcccccttttctgaaactcgcaagaattagcgacgcagacccaggcgctcgatgagctgggtgtaacgtgctacgtctttacgtttcaggtagtcgagcagtttacgacgctgagaaaccatgcgcagcagaccacgacggctgtggtgatcttttttgtgctctgcaaagtggccctgcaggtggttgatctgtgcagtcagcagtgctacctgaacttcggtagaaccggtgtcgtttgcgtcacgaccaaactcagaaacgattttagctgttgcttcagtacttagagacattttaaaactccaaagtatatagaatgaaaggacgccgatctctaattcagcgatcccagtgtacgttacgcaaagtgttaaacaatttacgcgacgttaagcggcagtattctactcgtagcgacctgttatcgcaagacggttaacattacgccgggtattcaaccaccaggcgacgaggcgcaacgcggccttcatcgtcaatttcgcccataccgataaatttgccgttctcaccttccgtgacgcgaaccagtccttccagtggcgcaccagatgtacgaaccgggttaccatttttgaagtaaacagaagacgttaacggaagattcaccaccggatagtcgctagctggactgtccattggcatcagtaatggatcaagtaactccgcggctggaatatcctgctgttcagcttgctcaacaagttcacgcaggtgctccagggtcaccatccgttcaaccggatatttacttaccgccagacggcgcaggtaaataacatgcgcgccacagccgagtttttcacccaggtcatcaatgatggtgcggatataagtgcctttactgcagtgaatttccagctccagctcattgccttcatggcgaataaacagcaattcataaacggtaatcggacgcgcttcacgcggaacttcaatgccctgacgcgcatattcgtacagttttttgccctgatatttcagtgcactatacatgctagggatctgttcgatatcgccacggaaagtatccagtgccgctgccagctgctctgcgctaaaggttaccggacgttcttcaacgatctgtccgtcggcatcagaagtatcggtacgctgtccaagacgcgcaatgacccgatagcgtttgtcggagtccagcagatactgggaaaacttcgtcgcttccccgaggcaaatcggcaacatgccggtcgccagcgggtccagcgcaccggtatgcccggcacggttggcgttatatatacgtttcactttttgcagcgcatcgttgctggacataccctgaggtttatccagcaacaaaacgccgttaatgtcgcgaccgcgacgacgaggacgactcattagtcctccttgctgtcgtccgggttaacacgacgttcttcgtcatgtttgaccacgctggtcaccaggttactcatgcgcatcccttcaaccagagagttgtcgtagaagaaggtcagttccggcacgatacgcaggcgcatcgctttccccagcaggctgcggatgaaaccagaagcttcttgcaacgctttgatgcccgctttaaccgcgtcttcatctttgtcgttgaggaacgtcacatatactttggcatacgccaggtcgcgagacatttcgacaccggaaacggtggtcatcatgcccaggcgaggatctttaatttcacgctgcaggatgagagcgatctctttttgcatttcctgcgctacgcgctgcgggcgaccaaattctttcgccataataaattctcctgacaaaaaaggggctgttagcccctttttaaaattaatttcaggtggaagggctgttcacgttgacctgataagacgcgccagcgtcacatcaggcaatccatgccggatgcagcgtaaacgccttatcccgcatggaaccctaaaaaccttaagcaatggtacgttggatctcgatgatttcgaatacttcgatcacatcgccagtgcggacgtcgttgtagttcttaacgccgataccacattccataccgttacggacttcgttaacgtcatctttgaagcggcgcagggactccagctcgccttcgtagataaccacgttgtcacgcagaacgcggatcgggttgtgacgtttaaccacaccttcggtaaccatacagcctgcgatggcaccaaatttcgggcttttgaacacgtcacgaacttccgccagaccgataatctgctgtttcagttccggagacagcataccgctcatcgccgctttcacttcgtcaatcaggttatagatgacggagtagtaacgcagatccaggctttccgcttcaatcactttacgtgcagaggcatcagcacgtacgttaaagccaaccaggatggcgttggacgccgcagccagggtggcgtcggtttcggtgataccacctacgccagaaccgatgatcttcactttaacttcgtcagtagacagtttcagcaaggagtcggagatcgcttcgacagaaccctgtacgtctgccttcaggacgatattcacttcgtgaacttcgccttcggtcatgttggcgaacatgttctcgagtttagatttctgctgacgcgccagtttaacttcgcggaatttaccctgacgatagagtgcaacttcacgcgctttcttctcgtcacgtacaacggtaacttcatcacccgcagccggtacgccggacaggccgaggatttccaccggaatggacggacccgcttccagcacttcctgacccagttcgttacgcatcgcacgaacacgaccgtattcgaagccacacagaacgatatcgcccttgtgcagagtaccttcacgtaccagaacggtagcaaccggaccacgacctttatcgaggaaggattcgataaccgcaccgctcgccatacctttacgtaccgctttcagctccagaacttccgcctgcagcaggatagcgtccagcagttcatcgataccggtacccgctttcgcagatacgtgtacgaactggctttcaccgccccactcttccggcaggatgccgtactgggagagttcgttcttaacgcgatccggatcagcttctggtttatcgatcttgttcactgcaaccaccaccggtacctgcgccgctttcgcgtgctggattgcttcgatggtctgcggcatcacaccgtcgtcggcagcaacaaccaggactacgatgtccgttgcctgcgcaccacgagcacgcatactagtaaacgcggcgtgccccggggtgtccaggaaggtgatcatgccgttttcagtttcaacgtggtatgcaccaatgtgctgggtaatgccgcccgcttcgccagaggccactttcgtactacgaatgtagtccagcagagaggttttaccgtggtcaacgtgacccatgatggtcacaaccggcgcgcgcggttcagccgcagcacccgtgtcacggtcgctcattaccgcctcttccagctcgttttcacgacgcaggataactttatggcccatctcttcagcaaccagctgtgcggtttcctgatcgataacctggttgatggttgccattgcgcccagtttcatcatcgctttgatgacctgagagcctttaaccgccatcttgttcgccagttcgccaacggtgatagtttcgccgatcacaacgtcacggttaacggcctgagcaggcttctggaagccttgctgcaggctagaacctttacgttttccgcctttaccgccacgtactgctgcgcgtgcttcttcacgatcagctttactttcagcgtgtttgttgcctttcttcggacgcgctgctttcgcgttacgaccacggccacggccgccttcgacttcacgatcgctttcgtcttctgcctggcgagcatgttgagaagtagtgacgtgataatcgctggaatcttcagtcggttccgcgttatcagtccatttgttttcttccgccatacgacgtgcttcttcagcaacgcgacgtgcttcttcttcgagtttacgacgcgcttcttcttcagctttacgcttgagctctgcagcttcctgctcacggcgggctttttcagcctgggcgtttttagtcatatcgtcttgttgattgctcactttgtctttttccgcagcttcacgtttcgcttgttcagcagcttcacgcttagcttgttctgcggcctcacgttcagctttttgttgcgcctcgcgtttagcgctttcttctgcctcacgacgggcttgctcttccgcttcacgctgcgcttgctcttccgctgcaaggcgttcagcctcttgcggatcgcgtttcacaaaggtgcgtttcttgcggacttcgatttgtacgcttttgctttttccaccggtaccaggaatgttaagggtgctgcgtgttttacgttgcagcgtcaatttgtccgggccactatttttctgattcaggtggtcaatcaaagtctgtttctcttgtgcagacacagagtcgtcagcagacttccggatacctgcatcagcaaattgctgtaccaggcgttccacggaggtctgtcgctctgcggccagcgttttaatcgttacatctgtcatgctgttccttcctgctacagtttattacgcttcgtcaccgaaccagcaaatattacgggcagccataatcagtgctccggctttttcgtcggtcaacccttcgatatcagccagatcatcaatgccctgttcggcgagatcttccagcgtacaaacgccacgggcggccagtttgaatgccaaatcacgatctaccccttcaaggttcagcagatcgtcagccggtttgttatcaccgaggctttcttcctgggcctgtgcaatggtggccagtgcatttttagcacgctcgcgcagtgcttcaacggtcggctcatcaaggccttcgatttccaacagctctttcatcggcacataggccaattcttccagcgtgctgaagccttcttctaccagaacagtcgcgaagtcttcgtcgatgtcgagatatttggtgaaggtgtcgatcgctgcgtgcgcttccgcctgatgcttagcctgcaggtcgtcaacggtcatcacgttgagttcccaaccgctcagctggctagccagacgcacgttctgaccgttacggccaatcgcctgcgccaggttaccggcttcaacggcgatatccatggtgtgtttatcttcatccaccacgatagaagcaacgtctgccggtgccattgcgttaatcacgaactgcgccgggttatcatcccacaggacgatatcgatacgctcgccacccagttcagtagacaccgcctgaacacgcgcgccacgcatacctacgcaagcacctaccggatcgatacgtttatcgttggttttcaccgcgattttcgcacgagaacccggatcgcgagccgctgctttaatttcaatcacttcttcgccgatttctggcacttcaatacggaacagttcgatcagcatttccggcttggaacgagtgacgaacagttgcgcgccacgcgcttccgggcgaacggaatagagcacgccacgaacgcggtcgccagggcggaagttttcacgcggcagcatatcttcgcgcaggatcacggcttcagcgttgttgcccagatccagagagatgttgtcgcggtttacttttttcaccacgccggtgatgatttcaccttcgtgttcacggaactgatcaaccaccatcgcacgttcggcttcacgcactttctgcacgataacctgttttgccgtctgggtagtgatacggtcaaaggtaacagactcaatctgatcttcaacgtaatcgcccaggttcaggctttcatcttcataacgtgcggcttcaagggtgatttccttggtcggctgggtgacttcatcaacaactaaccagcgacggaaagtgtcaaaatcaccgcttttgcgatcgatctgtacgcggacgtcgatctcttgttcatattttttctttgttgctgtcgccagcgcgctttccaatgcttcgaaaatcttctcgcgaggtagcgccttttcattggatacggcttcaactacagccaaaatttctttgttcatcgcgggcttttcacctcatccagactattaaaagtggggaaccaggttcgccttctggatattactcagcgcgaacacttcatctttaccttcgacggtaactgtgatcatttcaccgtctaccgctttgataacgccctgccatttacgacggttttgtaccgccatacggagaaccagagtcacctcttctccgacaaaacgggcgtagtgttcagccgtgaacagtgggcgatcgagacccggactggagacttccaggttataagcaacggtgatgggatcttcaacatccagcacagcacttacctggtggctcacatcagcacaatcatcaacattgatgccatcttcactatcaatatagatgcgcagtgtggatgtgcgaccgcgaataaattcgatgccaaccagttcaaaacccagggcctcaactggcgcagtaatcatctctgttaatttttgctctaatgtggacaagcccacccccaagacataaaaaaagggcctaaagcccagttattctgtagtcagataacaaaaaaccccgataaatcggggctttatataactgaaccctataaccgcaactgcggtctggagcactttccagaaggattttttcaaatcccactacgaaggccgaagtcttcacagtatatttgaaaaaggactctaagggaaagtggttgcgggggccggatttgaaccgacgatcttcgggttatgagcccgacgagctaccaggctgctccaccccgcgcctgaaacgtggcaaattctactcgttttgggtaaaaaatgcaaatactgctgggatttggtgtaccgagacgggacgtaaaatctgcaggcattatagtgatccacgccacattttgtcaacgtttattgctaatcatgtgaatgaatatccagttcactttcatttgttgaatacttttgccttctcctgctctcccttaagcgcattattttacaaaaaacacactaaactcttcctgtctccgataaaagatgattaaatgaaaactcatttattttgcataaaaattcagtgagagcggaaatccaggctcatcatcagttaattaagcagggtgttattttatgacgacgattctcaagcatctcccggtaggtcaacgtattggtatcgctttttctggcggtctggacaccagtgccgcactgctgtggatgcgacaaaagggagcggttccttatgcatatactgcaaacctgggccagccagacgaagaggattatgatgcgatccctcgtcgtgccatggaatacggcgcggagaacgcacgtctgatcgactgccgcaaacaactggtggccgaaggtattgccgctattcagtgtggcgcatttcataacaccaccggcggcctgacctatttcaacacgacgccgctgggccgcgccgtgactggtaccatgctggttgctgcgatgaaagaagatggcgtgaatatctggggtgacggtagcacctacaaaggaaacgatatcgaacgtttctatcgttatggtctgctgaccaatgctgaactgcagatttacaaaccgtggcttgatactgactttattgatgaactgggcggccgtcatgagatgtctgaatttatgattgcctgcggtttcgactacaaaatgtctgtcgaaaaagcctactccacagactccaacatgcttggtgcaacgcatgaagcgaaggatctggaatacctcaactccagcgtcaaaatcgtcaacccgattatgggcgtgaaattctgggatgagagcgtgaagatcccggcagaagaagtcacagtacgctttgaacaaggtcatccggtggcgctgaacggtaaaacctttagcgacgacgtagaaatgatgctggaagctaaccgcatcggcggtcgtcacggcctgggcatgagcgaccagattgaaaaccgtatcatcgaagcgaaaagccgtggtatttacgaagctccggggatggcactgctgcacattgcgtatgaacgcctgttgaccggtattcacaacgaagacaccattgagcagtatcacgcgcatggtcgtcagttgggccgtctgctgtaccaggggcgttggtttgactcccaggcgctgatgctgcgtgactctctgcaacgctgggttgccagccagatcactggtgaagttaccctggagctgcgccgtgggaacgattatagtatcctgaataccgtcagtgagaacctgacctacaagccagagcgtctgacgatggaaaaaggcgacagcgtgttcagcccagatgatcgtattggtcaattgaccatgcgtaacctggatatcactgatacccgcgagaaacttttcggttatgccaaaactggcctgctttcctcctctgccgctagtggcgtgccgcaggtggagaatctggaaaacaaaggccagtaattcgacatcaaccctgcccttcaggggtggggttaccttgcttatcctctgtaaactcctttctgagcatcacataatcgaaaacatcatggtttgcatccacaacccgactgtctcctttatagtgtgcaatcacttcctcaagcgtttgcggctgttccggctttgttacccccatccacgcattaataaggtaattattgtaagctgtgctaaagatgttgttttccgttgtgcgatccacgccatccccaagaacggggctataccagataaacatcgggacatgatatgcctgctggctagcctccctgcctccatgaaaatagacgttcttcttcgtagggtcacgttccaggccgtggtcggcaaaatacatgacgctggcgcggcgatcttttaataattcaaaaacctgacctagcaaactatctgtgtaatgaatggagttgtcatagcaggcatcctgatcgtcctgcggttgaaacacggcgctggattgcggataggcgctacaagccggttcatggcttccatttaaatgaagaacaatcagtttcttttgctgcgtattttgctgtaatgcttggcttaaatgcggcaacaacaattcatcaaatcctctgacataaactgtttccatggcgcgcatggcgatactggtaactgctgtaccattctgccgaaaagcggattggctgcttagccagaaagtctgaaatcctgcttgattagccatattaataatgttgtcggggtaattatgaatgtcatgactcaaaacagaatcagcagttaaagaaaggggaacgctcagcgcagtgtaaggtgcgccgcttattgcttgattaaacagtttgatctgttttctttgtgcttcaacttgcggtgtcgtagagcgtgtatatccatacaaagacatattgtcgacacgtacagactcccccacaatcaacacgtaggtatcaatacctgtatccctgacacttaattgaaaatacggcaccgtgtttgcaatactgagtaatctttgatgctctttcgctgctaaagcaaaatagttgagattgaaaaacggcgtataggtagcaaatcggctcgctagtatatatggactgaacgcttttttattttttgcatctttataagcaaattgacaagcggaaaataaactgccgctaatgacaatcagcaataatattcctgtcactttttttgtcggcaaggaaacatcatattttattattactgccaaaaaaagaagggataaaaaagcaaaggcacatagataagggatatacatccccagcattttgacaacttcatccggatcactctggagcacactaatcgcaaatccatcattgaaagttgtaccaaaggtacaccaactatagaggctaatactcatgtctgccgcagtcagtaacacaaatggtgcggcaacaagcaggcgaagcggaagggaacttatacgttttacaaccaggatggtcagaacgaagaacagcaagcgctgaaccatatgcgctccggaagaagcgactaagttcgtaataccaaaaacaataacacaaagatacaacaaccaatgagatttaaaagttctagcaaatttgttgaatactgtcatccagaaatccaagttcacaaccaatataaacaattatcaacaatgtttaattttatatcagacatgtttttcaactctgatccatatcagaacgaaacactgttagttttttctttttaaatgatgcggccattgcgttctcagtaattaaataacattatcaatgcgtctctaaacattacgcagaacgtagccatcagtcgttatactgacaggagcaggatggtttatcgagaagtaaacatatccgtattcgtaccggaactggagttgacacaataaagtgccaattatgtcagtagaagggaaaaatttataactaaggcgtaccggcaccatcgtttcaaggtaccagctacgagtaaagcaactggacgagatacagatacctgacaaccattcctcagaccaggaccaaaacgaaaaaagacgcttttcagcgtctcttttctggaatttggtaccgaggacgggacttgaacccgtaagccctattgggcactaccacctcaaggtagcgtgtctaccaattccaccacctcggcacggatactactttttagttcgggatatcgctggtcggcttagccggagcagctggctgagtttgttcggttttcgccggtgcactcagattttcccattcgctacctttattggttttgttgctattgatgttacccagcaccagactgatgatgaagaataacgttgccagcagcgccgtcatgcgggtcatgaagttaccagaaccactactaccaaacagcgtagcggaagcgcctgctccgaaggaggctcccatatcagcgcctttaccttgctgcagcatgatcagaccaacaaggccaattgccacaataaggaaaactactaaaagagcttcatacataatcaacctgttccttgcggagttgccgcgtaccaatgcttcaaccaataaagcgggagtttttaatctttcccactgaagcgggtgtgaatactaaccaaagcgaatgaccttcgcaagggcaattttatcgcattgtatcaactgcggaaaaaaacagcaaaaccgatgtgttcgctgagaaaaaaggcgacaatcgccgcctttttagccagttatctaacgctttaaacggcttttactgcatcggcgatgcggtgtgcaaattcagtcacctgcgcttcgtcttcgccttccaccatcacgcgaattaacggttcggtgccggatttacgcagcaacacgcgtccacggttgcccagcgcagcttcaacctctgcggtcacggctttaacactctcatgctcaagtggatcgccgctacctgcggtgtaacgtacgttaaccagaatctgcgggaacattttcatgccgctgcaaaggtcgtgcaggctcatatggttacgtgccatcgccgccagcacctgcaagccagcaacgatgccgtcaccggtagtagttttatccagcaggatcacatgaccggaattctctgcaccgatacgccagcctttctcctgcattttttccagtacgtagcggtcacccactttcgcgcgcgcaaatggaattcctaactgtttcagcgccagttcaagccccatgttgctcatcaatgtacccacagcgccaccacgcagctggccctgacgaagaccttcacgcgcgatgatatacatgatctgatcgccatcgactttattgccttcatggtcaaccataatcacgcgatcgccatcgccgtcgaaggcaataccgagatccgctttttcagccagcacacgagcctggagcgcgcgaacgtcggtagcccccacttcggcattgatgtttacaccgtttggctcacaaccgatagcgataacgttcgcccccagttcgcgcagcacgttcggcgcgatgtgataagtcgcaccgtttgcacaatccaccacaatcttcagttcactgaggctaagttcgttcgggaacgtggctttgcaaaactcgatatagcgacccgcggcatcaacgatacggctggctttacccagttctgcgctatcaacgcagctgatctccttttccatttccgcttcgatggcctcttctaccgcatccggcagtttggtgccgtcgatagagaagaatttaatgccattatcgtagaacgggttatggcttgcagatatcacaattccggcctctgcgcggaaggtacgcgtcagataagccacggccggtgttggcatcgggccagtgaagagtgcggaaaggcccgctgccgccagacccgcttccagtgcactctccagcatatagccagaaatacgcgtgtctttaccaataataatcttacgggagccgtggcgcgccagcactttacccgcggcccaacccagcttaagcacaaaatcaggtgtgatcggcgcatcccctacacgaccacgaatcccatcggtaccgaaatatttacgattactcatagcgtttgttttcctttgcagacagagtggcttccaccacccgcatcgcttctacggtttctttgacgtcatgaacacgaatgatgtgcgcgccttgcattgcggcaatgaccgcacaggccagactaccgctcaggcgctcggacggccccacgttcagcagctgcccaatcatgctttttcgactcatacccaccaacagcggcaggttgaaatggtgaaattcagccaggcgcgccagtaaactatagttatgggagagatttttaccgaaaccgaatccggggtcgagcaacaatttctcttttgcgatacccgcctgctcgcaacgtgctatttgctcaataaagtagcgattcacttctgcaaagacatcgtcatacttcggagcttcctgcatggtttttggatttccctgcatatgcatcagacaaaccggtaaaccggtttctgcagccgcctccagagcgccaggttcggaaagggagcggatatcattaataatgtgagcgccaactttcgcactctcacggatgacttctggtttggatgtatcgacactgatccagacttcgaagcgttgagcaattgcctcaaccacaggaataacacgttgcaactcttcttcaacgctaacttccgccgcccctgggcgcgtggactcgccaccaacgtcaatgatcgtcgcgccagcgttgatcatcagattcgcatgtttcaccgcatctatcaggctgttatgcgtgccaccatcgctaaaggaatcaggcgtgacgttgaggatccccattacgtgaggatggctaaggtccagactagtaccctgggcaaagagtttcatgatgttatccctggtatgaattgataagaaaaaaccccggagcacgccccggggttttcggtacaaatacagtcatctgatgcgggaacttacttgtcgcctaactgctcactcatggtgttacccgggttcggcgtacgcggttcatcaaccggacgaggagcctttggactaccattgtcgccagaattgttagaagcgcctggttcttcccagcccgctggcggacgtacatcgcgacgtgccatcaggtcatcaatctgcggtgcgtcgatagtctcatatttcatgagagcatctttcatcgcatgcagaatatccatattgtcggtcagaagctgacgcgcacgattatagttacgctcaatcagtgctttcacttcctggtcgatgatacgtgcagtttcatcggacatatgtttcgctttcgctacgctacggccgaggaacacttcaccttcttcttccgcgtacagcagtggacccaatttctcagagaagccccactgagtcaccatgttacgtgccaggttggtcgcaactttaatatcgttggacgcaccggtagatacatgttccggcccgtagatgatctcttctgccagacgaccaccgtacagcgtagaaatctggctttccagtttctgacggctggcgctgattgcgtcgccctcaggcaagaagaaagtcacacccagcgcacgaccgcgtgggataatcgtcactttgtgcaccggatcgtgttccggcaccaggcgaccgataatcgcatgacccgcttcgtggtaagccgtgctttctttctgcgcttccgtcatcaccatggagcgacgttccgcacccatcatgattttgtctttcgctttctcgaactcaaccatgctcacaacgcgtttgttgccacgagcagcgaacagtgccgcttcgttcaccaggttcgccaggtcagcaccggagaaaccaggagtaccacgggcaatgattgccgcgtcgatatcgggtgccaatggtacgcgacgcatgtgaactttcaggatctgctcacgaccgcgaacatctggcaagccgaccacaacctgacggtcgaaacggccaggacgcagcagggccgggtcgagaacgtccggacggttagtcgcggcgataacgatgataccttcgttaccttcgaagccatccatctcaaccagcatctggttcagagtctgttcacgttcatcgtgaccaccgcccagaccagcgccacgctggcggcctacggcgtcgatttcatcgataaagatgatgcacggtgccgctttcttcgcctgttcgaacatgtcacgaacacgggatgcacccacaccgacgaacatttctacgaagtcagaaccggagatagtaaagaacggaactttcgcttcgcctgcaatcgctttcgccagcagcgttttaccggtacccggaggaccgaccatcaagacgcctttcgggatcttaccgccgagtttctggaagcggctcggctcgcgcagatactcaaccagttcagcaacttcttcttttgcttcgtcgcagcccgcaacgtcagcaaaggtcgttttgatctgatcttccgtcagcatgcgcgctttgctcttaccaaagctcatggcacctttgccaccgccgccctgcatttgacgcatgaagaagatccagacaccaatcagcaacagcatcgggaaccaggagatgaagatagaagccagcaggcttggttcttcaggcggttcaccgacaaccttgacgttcttggtcaacaggttatccagtaatttcggatcctgaaccggaatgtaagtggtataacggttactatctttcttggtaacgttgatttcacgtccgttgatacgcgcttcacgaacctggtcgttattgacctcttgtaggaaggtagagtaatccaccttacggccattagactcgctgggcccaaagctctggaatacactcatcagcacaacggcaatgaccagccagagtattaggtttttcgccatgtcactcaagggattaacctcttattacaactgtgttaaaaacagcgtcaggatactctatatccagcatctttcaaactttcgtctgaaatctcccggttagggtttacgcccggtcgctacaatatacacttcccggctacgtgcacgagaagagtccagcttacgaactttgaccttcgtaaacagggagcgaatttcccttagatactcatcgaaaccttcgccctggaacaccttcactacaaaactgccacctggcgctaatacatcacgacacatttctagcgccagttccaccagatacatggcacgggggatatccaccgccggtgttccgctcatgtttggtgccatatcggacatgacaacctggactttgctgtcgccaacgcgctccagcagtgctttcatcaccagttcatcacgaaaatcgccctgaagaaagtccacaccaacgataggatccataggtaaaagatcgcaagcgatgatgcggcctttgccgccaatttgggtgaccacatattgactccaaccacccggagcagcaccaaggtcgacaaccgtcattcccggtttaaagagtttgtcactttgctgtatttcatcaagtttaaaccaggcacgggaacgtaacccctttttctgtgcctgttgaacatatttatcgctaaagtgttcctgaagccagcggctggagctggcagaacgcttcttacctgtcatttaactttcccatggggataactcatcgtaaccaattgcgtaaatttttacgcgcctatttggtgatatatgggagatggcggtagaatgacccgttttcaatcccaacgtaagcaaaaaatacgatgaatctgagtactaaacaaaaacagcacctgaaaggtctggcacatccgctcaagccagttgttctgcttggcagtaatggtttgaccgaaggggtgctggccgagattgaacaagcgttagagcaccatgaactcatcaaggtgaaaatcgccaccgaagatcgcgaaactaaaaccttgatcgtggaagctatcgtgcgcgaaaccggcgcctgtaatgtacaggtcatcggtaaaacgctggtgctttatcgcccaactaaagaacgtaaaatcagcctgccacgctaagattatcctaaagttacacacatttgctgtgtaaaacgaggggttttccgcaggcaggagagcaaaatgccacgctctgttcgttgataaaaggccgcatagcggcctttttcctttctttacaatacatcaacatcttgagtattgggtaattcttacaggtattccaccttaattacttcaaattctacttcgccgcccggcgttttgatgaccacaacatcatcttcttctttgccgatcaggccacgagcaatagggctgtttacagaaatcaggttttgtttaaagtcagcttcgtcatcgccaacgatgcgataagtctgttcttcgtcagaatccagattcagcaccgttacggtagcaccaaaaataacgcgcccattgttgggcattttggtgacatcaatcacctgcgcgttgctcagcttggcttcgatgtctttaatacggccttcgcagaaaccctgctgttcacgagctgcgtggtattcggcgttttctttcaggtcgccatgctcacgcgcttccgcgatagcagcaatgatttcaggacggcgcacagatttcagaaaatccagctcttcgcgtaatttttcagcgccgcgtaaggtcatcggaatagcttgcatttgttatacctcttgaatattcctgatagggcaagtcttcacccaccccggctgttcggcctgcccggcataactccttaccgggaccagaagcaaaaaaataccgacccgggtacaagtcccaggtcagctacaattcacattttgatagtcattttaccctgaagttcccgaagggtcatcgtttactttatagggcgttgcgccgtagtatgacggctcgattccaggttgttagcgcgagattatgcgattttccagatttatcatcggattgaccagctgtatagcgttcagtgttcaggccgcaaatgttgatgagtacattactcaactccccgctggtgccaaccttgccctgatggtgcaaaaagtcggcgcgagcgcccccgctattgattaccacagtcagcagatggcgctgcctgccagtacccagaaagtgattactgcgctggcggcgttgattcaactcggccccgattttcgttttaccacgacgcttgaaaccaaaggcaatgtggaaaacggcgtacttaagggtgacttagtggcgcgatttggtgccgatccgacgttaaaacgtcaggatattcgcaatatggtcgcgactttgaaaaaatctggcgtcaaccaaatcgatggcaatgtgttgatagatacctccattttcgccagccacgataaagcccccggctggccatggaatgacatgacacaatgctttagcgctccgcctgccgccgccatagttgaccgcaactgtttctccgtcagcctctacagtgccccaaagcctggtgatatggcttttatacgcgtggcatcttattaccccgttacgatgttcagccaggtacgcaccctcccccgtggttctgccgaagcgcaatactgcgaactggatgtggtgccaggcgacctgaaccgctttacgctgacgggatgcctgccacaacgttctgagccgctcccgttggcttttgccgtgcaggatggagccagctatgccggtgcaattctgaaagatgagttaaaacaggcgggtatcacctggagcggaacactgctgcgccagactcaggttaacgaacctggaacggtagttgccagtaaacagagcgccccgctgcacgatctgcttaagattatgctgaaaaagagcgacaacatgatcgccgatacggttttccgcatgataggccatgcgcgcttcaatgtgcctggaacatggcgggccgggagcgacgccgtgcgtcagatcctgcgccagcaagccggtgtcgatattggaaacaccattattgccgatggtagtgggcttagccggcataacctgattgcccccgccaccatgatgcaggtgctgcaatacattgcccaacacgacaatgaacttaactttatctccatgctgccgctggcgggctatgacggctctttgcagtaccgtgcaggtctgcatcaggcgggcgtggatggaaaagtcagtgcgaaaaccggtagcttgcagggggtatataacctggcgggattcattaccacagcgagcgggcaacgaatggcgtttgtgcaatatctttctggctatgcagtagaacctgcggatcagcgtaatcgccgtattccgttagtgcgttttgaaagccgtttgtataaagatatttatcagaacaattaatcaaaaagaaaccccggcacatggccggggcttcagattattgacaaagtgcgctttgtttatgccggatgcggcgtaaacgccttatccggcctacaaaatcgtgcaaattcaacatattgcaattctcttgtaggcctgataagcgtagcgcatcaggctgatttggcgtttatcatcagtgattaacgcttgtaaatgaactcaacgccttcttcgtcgtcttcgtcccagtcgtcatcccagtcttcatcatcctcttcagcaatctcttcaagctgctggcgatgataatcatcccacatgaattcgactttctctggctgtttcgcttcttcagcctgcacgaccgggttttcaatgataaaggtcatcacatcccagcagagatctttcacgcccagtccactcgccgcagagatcagataatatttatcttcccagcccagcgcctcagcgatcgctttcgctttctcttcggcttctaccttatccagcagatcgatcttgttgaacactaaccaacgcggtttcgtcgccagatcctggctgtatttttccagctcgctgataataatacgcgcgttttcaaccggatcggtgccgtcaatcggatcgatatcgatgaggtgcaacaggacgcggcaacgttccaggtgcttcaggaagcgaatgcccagacctgcgccttccgcagcgccttcaatcagtcctggaatatcggcaacaacgaagctcttttcgttgtccattcgtaccacacccagacttggcaccagagtggtaaacggataatccgccactttcggtttagccgcgcttaccgcacgaataaaggtgcttttacccgcgtttggcatccccaacataccgacgtcagccagcagcatcagctccagcagcagctcgcgcttatcgcccggcgtgccgttggttttctgccgcggtgtacggttaacggagcttttgaaacgggtattgcccagaccgtgccagccgcccttagcaaccagcagacgctgaccgtgtttggtcatatcgcccatggtttcaccagtaccctggtcgattacacgcgtacctaccggcactttaatcgtcacgtctttaccgcgcttaccggtacagtcgcggcttgcgccattctgaccgcgctctgcacggaaagatttttcaaaacgataatcgataagcgtgttcaggttctcgtcggcttccatccatacgtcaccaccatcaccgccgtcgccgccatccgggccgcctttcggaatatacttttcgcggcggaagctcacgcaaccattaccgccatcacctgcaacgaccagaatgcttgcttcatcaacaaacttcattttattctccgtaaatcattcgcctgcgcggggttggcttaccaccgttgtatgcttacgtaatccgccccaaatacgatgaccaatggcggaatacatcgcgcccgcaaccacgacaaacgcaccgagataacctaaaaggtttaacatcggtctggcgaagaaatcgggccaggccagacttaaaagatcactaaaaaacagcgtaaacagtggggtgagcgtgatgatcgcgctcacctgcgctgcctgccagcgagccatcgcttccgccagggcgccatatcctaccaaggtattcagtccgcaaaaaattaaacatgcgagctgccagtggctaagctgcgctatcactccaggctttgccagagggaagagcgcaattgtacataaagtgtacagtaaaaacaggatctgcggactggccagccgacgcaataaaaccttttgcgccacgccataactcacccaaaccgtcgccgcaccgaccccaaagataactccccaggtgtaatcggtgagctttgtaaatatctcgaccagactggtgttaaaaaacatcaccaggccgctcaggagcatcaatgcccctacaacctgagtgctgcgcattttctctttgaggataaatacgctggcaaccatcatgccaactgggctgagttgcccaatcacctggctagcggtcggactcaggtattgcaaggaactgctgaacaggatgaagttcccaaacagcccggcggtcgccactgccaacaaaatcaaccagcgtggcttacgaaacacgcgtaatggcggcaacctcttcttcaccgcaagaatggcacccaggccaatactcgccatcaagaaacggtaaaacacgattgtcggaggttccatcacctccagcacctgcttcattgcgattggcaacgccccccagcaaattgctgtggtgagcgccaaaagaatgccaatgcctgcctgctgcttcataccgtattccctgcaaagcgcatttgcggattaacgtcgcaccatgcgcatttttaccggttatcgaatgtaaaaagccccgcaacgtgttgcggggctttcatccgttaccgggacgcgaaaaacttattcagcttcgatgctgataaatttacggtttttcgggcctttaacttcgaatttcactttaccgtctgctttagcaaacagagtgtggtcacgaccgcaacctacgttagcgccagcgtggaatttggtaccacgttgacgaacgatgatgctacccgccagaacggattcgccaccgaaacgcttaacgcccaggcgtttagcttcactatcgcgaccgttacgtgtggagccgccagcctttttatgtgccatttgaaatctctcctcaggtcttaggcgctgatgccagtaattttcacatcagtgaaccactgacgatggccctgctgcttacgatagtgtttacgacgacgaaacttaacgattttaactttctcgccacgaccgtgagcaacaacttcagctttgattacgccgccatcaacgaaaggaacgccgattttgacttcttcaccgtttgcgatcatcagcacttcagcgaactcaacagtttcgccagttgcgatgtccagcttttccaggcgaacggtctgaccttcgcttactcggtgttgtttaccaccactttggaaaaccgcgtacatataaaactccgcttccgcgcacaccttttcaatgattcagagtgcgctataaatattcacaatagggcgcgaatattacgcaaaacgcacgcctttgacaagtgctacagtcaatacacgaagaaaaaaaacacaacttgtacggtaacgtttatctgtgccattttttcagtacaatcaccctatattcctaaccataaaccctaagttgcctttgttcacagtaaggtaatcggggcgaaaagcccggcttttgcgatgaatttagaaaaaatcaatgagttaaccgcgcaagatatggcgggtgttaatgcggcaatccttgagcagcttaattccgacgtccaactgatcaatcagttaggctattacatcgtcagcggcggcggtaaacgtattcgtccgatgattgctgtactggctgcacgagctgttggctatgagggaaatgcgcatgtcaccattgctgccctgatcgagtttatccacacggcgactctgctacacgacgacgttgtggatgaaagtgatatgcgcaggggtaaagctaccgccaacgccgcatttggcaatgccgccagcgtgctggtaggcgattttatttatacccgcgctttccagatgatgaccagcctcggtagcctcaaagtgctggaagtcatgagtgaagccgtaaacgtcatcgcagaaggtgaagttctgcaactgatgaacgttaacgatccggacatcactgaagaaaactacatgcgcgttatctatagcaaaaccgcgcgtctgtttgaggctgccgcgcagtgttccgggattctggctggctgtacgccggaggaggagaaaggcctgcaggattatgggcgctatctcggcactgctttccagttgatcgacgatttactcgattacaatgccgatggcgaacagttaggtaaaaatgtcggcgacgatctgaacgaaggtaaaccgacgctgccgctgctgcatgcgatgcatcatggcacaccagaacaggcacagatgatccgtaccgccatcgaacagggtaacggtcgccatcttctggaaccggttctggaagcaatgaacgcttgtggatctcttgaatggacgcgtcagcgtgccgaggaagaagcagacaaagccatcgcagcgttacaggtgctcccggacaccccttggcgagaagcactcatcggcctcgcgcacatcgctgttcaacgcgatcgttaatcccctcccctcatcccgcgcagcgcgcgggatggttccagtaagttccataaaaacacttattcagctctataacacctgaaaaatagggatgtgcatctttatatattctgaatattcacactctttacaggaactttttagagcaataggccatcaggagtatagtgatgctcgacagaagaagtgttctgaatgaaagcgactaacttaaggagtgaggaaaaatggaaagtaatttcattgactggcatcccgctgacatcattgcgggtttgcgcaagaagggaacgagtatggcggcggaatctcgcagaaatggtttgagttccagtacgctggcgaatgcattaagccgcccatggccgaaaggagagatgattattgcgaaagccctgggaactgacccctgggttatctggccaagtcgctaccatgatccgcagacccatgagtttatcgacagaacgcagttgatgcgtagctacactaaaccgaaaaaatgagtggtctggcggtagccccgcgaacggggctgccagctctcagacgattattcgcctttcacacgctcaatatttgcacctaaagcgcgcagtttgtcttcaatgcgttcgtagccacgatcgatgtgataaatacgatcaaccaccgtcgtcccttccgcaatacagccagccagcaccaggcttgcacttgcacgcagatcggttgccataacctgtgcgccagaaagtttttcaacaccgtgacaaataacggtattgctttcgatttcggcgtgcgcgcccatacggctcagctctggcacatgcataaagcggttttcaaagaccgtttcggtgataaacccggtcccttctgccaccaggttcaacagcgtgaactgggcctgcatatcggtcgggaatgccggatgcggcgcggtacgtacgttaacagccttcggacgtttgccatgcatatccaggctaatccagtcttcgccgacttcgatgtccgctccagcgtcacgcagtttcgccagcacggcgtcgagagtatctggctgcgcgttacggcagataattttgccgcgagaaatcgccgccgccaccaggaaagtaccggtttcgatacgatccggcagaacgcgatagacaccgccgcctaaacgttccacaccttcgatgacgatacgatcggtgccctgaccgctaattttcgcacccagcgtaatcaggaagttcgcggtatcgacgatttccggttcacgcgctgcgttttcaataatcgtggtgccttccgccagggttgcagcacacatgatggtcaccgttgcgccaacgctgactttatccatcacgatatgtgcacctttcaaacgaccatcgacggaagctttaacgtaaccttcttccagtttgatggtcgcgcctaattgttcgaggccagaaatgtgtagatcaaccggacgcgcaccgatcgtacaaccgccaggtagactaacttgcccctgaccaaagcgcgctaccagcggccccagcgcccagatagaagcacgcatggttttaaccagatcgtaaggtgcgcagaatacattaacgtcgcgggcatcaatatgcacagaaccattacgttctactttcgcacccagctggcttagcagcttcatacttgtatcgacgtctttcagtttcgggacgttctggatctctaccggttcttccgccagtagtgcggcaaaaaggataggcagagcagcatttttagcgccggaaattgtgacttcgccctggagcttcgttggcccctgaacacgaaatttatccatttagtttgttctcagttaacaattcatatccgctaccggcgaatcgcccatagctcaaaagccgttcagtttgcgatcgcgcgcccactccgcaggggtatacgctttgatgctcacagcatgaatgcggttatccgcaatatattccatcagcggaccatagaccgtctgctgttttttaacccgactcatgccgtcaaacaactcacccacggcaataacctgaaagtggctgccatcgccggaaacgtggacttcctggagggagagagcgttcatcaacacgctctgaatttcattattttccatgggatcttcaatcatcagttaataaaccagcgaaacatcttagagcaaagttgcgctggcataaataagcaaaaagcctcgctgataaatcagacaaggctcgacttgcaggcaggtttgccggacaggcggttaacgccatatccggcctgaaaaaatttaacgaggcagaacatcagcaggcaaattatacaatttcgccagggtatacactttgtcgtttaccccctgaagcgtcacattgttgccctgctttttcgccagatcgataagatggagcagcagtgccagtccccccgtatccacgcgggagacacggctaagatcgatgcaggtaatccccttcaccgcttcctcacgcatttcccaaagcggtagcaaaacgtcctgatccagctctccggataacgccagcgtgtcacccgtctgcatccagctcagactctcgctcattattttttctcttccagagtgattttctgttgagaaatgcttttcagttgcgcagtcaggccgtcgatacctttggtacgcagcagcgttccccactcgttttgtttggtggtgatcatactgacgccttcagcaatcatgtcgtaagcctgccaattgcccgtctgggagtttttacgccactggaagtccagacgcaccggcggacggccattcgggtcaataatggtaacgcgaataggcacaatggttttatcgcccagcggctgttctggcgcaatctgataggtttgaccgtgatacatcgccagcgcctgaccgtaagcctgcttcaggtactcacggaaagcggcaaagtaggcttcacgttgagcaggggtcgcactcttgtaatactggcccagcaccagcgcaccggcgtatttcacctgtacgtatggcagcagttcctgatcaacaatggtacgcagataatccgggttggcccgaatttgcggttgctcattcttcaggcgatcgaacgttttctgcgccgcctcgtccatcagcttatacggattggtctggtctgccgcggttgccgcactcagaggtgcaatcaccagcaaagcgaccatcattaaacgtttaaacatgcgtcggttctcctgaaattatttcgttgtacccacaggttcagtggtttcattattacctggcgcagcagctggcgcatcgccactattcttattgtcatcgcctttactaccgtaaaggaactgaccaatgagatcttccagcaccatcgcagacttagtgtcctgaattgtatcgccatccttcaggatagcagtccccagttccgggtcttcaaaaccgacgtttaatgccagatattgttcccccagcaggccggaagtacgaatgctcaggctactggtatctggaatgtggttataacgttgttcaatttccagcgttacgcgcggcagataggttttcgggtccagcgtaatatccgccacccgacccacaacaacgccaccaatactgaccggagagcgcgctttcaggccgccaatgttatcgaacgtcgcataaagcgtgtaggtcggttcagtacgtatggacgtcacgttcgccgccttcaggcaaacaaacagcgccgccagcagtgctgctaataaaaagatacccacccaaatttcattttttttcgtttgcatgaactcaattcccaaacatcaatgcggtcagcacaaaatccagccccagaacagccagagagctgtggacaacggtgcgagtggttgcccggctaatcccggcagacgtcgggatggcgtcgtagccgttaaacaagctaatccacgtcaccgtgatggcgaacaccacgctcttaatcagacagttgaccagatccatacgccagtcgacggcattttgcattgcgctccagaagaacccgctatcaatgcctttccaactgacgccgaccagagatccgccccagatccccacggcgacgaaaataaccgtcaacagtggtaaactaataaccccagcccagaaacggggagaaataacccgacgcagcggatccaccgccatcatctccatactggagagttgctctgtagcgcgcatcaggccgatttctgcggttagcgcgctaccagcacgcccggcaaacaacaacgcggcaaccaccggccccagttcacgcagtaggcttaacgccaccagcatacccagactggtttccgcactataagtggtcagaaccagataaccttgcagccccaacaccattccgatgaacacgccagaaaccacaataatcagcatgctcaggacgccgacattatagagctggcgcaccagcagcggcgcatgtttgcgaaattccggtttgccgaccagcgcattgaataacattaacccggcccgcccgaacgttctcagggttttaatccctttatgtccgaggctcgccagcgcatttaacagcatgagtggcttaactccctggtaaaagatcagcgtgataatcgccggcaggatagcggaacggaacaggcccgtcagctatcccgtccagaaactgacgtacgcgcggatcaggattcgcctgcaacgcctgggcactgccatgagcgacaatttttttgtccgccaggatccaggcgtgatccgcaatacttaacacttccggcacatcgtgagaaaccaccacacaagtcacgcccagcgcgctgttcagctcagaaatcagcttcaccagtacgcccatggtgatgggatcttgcccaacaaaaggttcatcaaacatgatgagatccggctccagcgcaatcgcacgcgccagcgctgcacgccgcgccatcccaccggaaagttcagaaggcattagtttagccgctccacgcagccccacggcctccagcttcatcatcaccgtactatgcaacaatggcgcgggaagttgggtatgttcgcgcagtggataggcgacgttgtcaaatacgttcatatcagtgaacaacgccccggactgaaataacatgctcatccgtttgcgcactgtatacaggcggctacgagacatcgccggaatattctcaccatcgaaaaggatctcaccatgatctggtgcgatttgcccgccaatcagacggagtagcgtcgttttaccgatgccgcttggccccatgatcgccgtgatcttccctcgcggcacggtcagggaaatattatcgaagatgcagcgattgccacgcgtaaaactgacatcgcgcatatcgactaaattcgccacagactgctccataattcacccttcgtcttgcgttgattttctaagcatggcgctcaatttaaccttgaacccaacatatttacagaatattacccgccgtggttagcgaaagctggcatttgttttactttttagccgcataaagtcaaaattaagcatccgttacggctttctgaaaatcttcagcggaccggcgagtatacctgaagaaaggacgttagatgcttttagctacggcactgttaattgttggtttacttttggtcgtttacagtgccgaccgcctggtttttgccgcgtctattctttgccgaacctttggcatcccgccgctgatcatcggcatgacggtggtcagtattggtacaagcttaccagaagtcatcgtcagccttgccgcgtctctgcacgaacaacgcgatttagccgttggtacagccctcggcagtaacattatcaatatattgctgatcctcggtctggctgcgctggttcgtccttttaccgtccattctgatgttctacgccgtgaattacccttaatgttgttggtcagcgtggtggccggttccgtactctatgacggacaacttagtcgcagcgatggtatctttctcctctttctggctgtgctatggctgctgttcattgttaaacttgcacgtcaggctgaacgtcaggggactgacagcctgaccagagagcagcttgcagagctgccgcgtgacggcggattgcccgtcgcgtttttatggctcggcattgcgcttatcatcatgccagtggccacgcggatggtggttgataacgccacggtgctggcgaattactttgccatcagcgagttgacgatgggtctgacggcaattgctatcggaaccagcctgccggaactggcaaccgcaatagcgggggttcgcaaaggtgaaaacgacattgctgtcggaaatatcattggcgcaaacatttttaatattgtcatcgtgttgggtttacccgcgctgataacgccaggagagattgatccactggcgtacagtcgtgactacagcgtgatgttgctggtgagcattatttttgcgttgctgtgctggcggcgctccccgcaaccgggccgtggtgtaggggtattattaactggcggatttatcgtatggctggcgatgttgtactggttaagcccaatactcgttgaataactggaaacgcattatgagccacgtagagttacaaccgggttttgactttcagcaagcaggtaaagaagtcctggcgattgaacgtgaatgcctggcggagcttgatcaatacatcaatcagaatttcacgcttgcctgtgaaaagatgttctggtgtaaagggaaagttgtcgtcatggggatgggaaaaagcgggcatattgggcgaaaaatggcggcaacgtttgccagcaccggtacacctagttttttcgtccatcctggtgaagccgcgcatggtgatttaggcatggttaccccacaggatgtggtgattgctatctctaactctggtgaatccagcgaaatcacggccttaattccagtgcttaagcgtcttcacgtaccgttaatctgcatcaccggtcgcccggagagcagcatggcgcgcgccgcagatgtgcatctgtgtgttaaagtagcgaaagaagcctgtccgttagggctggcaccgaccagcagcaccaccgccacgctggttatgggcgatgccctcgctgtcgcgctgttaaaagcacgcggctttactgctgaagattttgcgctcagtcacccaggcggcgcactgggtcgtaaacttctgctgcgcgtaaacgatattatgcatacgggcgatgagatcccgcatgttaagaaaacggccagtctgcgtgacgcgttgctggaagttacccgcaaaaatcttggtatgactgtcatttgcgatgacaatatgatgattgaaggcatctttaccgacggtgatttacgccgtgtcttcgatatgggcgtggatgttcgtcagttaagtattgccgatgtgatgacgccggggggaatacgtgtgcgccctggcattctggccgttgaggcactgaacttaatgcagtcccgccatatcacctccgtgatggttgccgatggcgaccatttactcggtgtgttacatatgcatgatttactgcgtgcaggcgtagtgtaaagattcaaggataaacaacaatgagcaaagcaggtgcgagccttgcgacctgttacggccctgtcagcgccgacgttatagcaaaagcagagaacattcgtctgctgatcctcgatgtcgatggcgtactgagtgatggcctgatttatatgggcaataatggcgaagagctgaaagcgttcaatgttcgtgacggttatggcattcgttgtgcgctcacctctgatattgaagtcgctatcattaccgggcgaaaggctaaactggtagaagatcgttgtgccacattggggatcactcacttgtatcaggggcagagtaacaaactgatcgcctttagcgatctgctggaaaaactggcgattgccccggaaaatgtggcttatgtcggcgatgatctcatcgactggccggtaatggaaaaagtgggtttaagcgtcgccgtggccgatgcgcatccactgttgatcccgcgcgccgattacgtgacgcgcattgctggcggtcgtggcgcagtgcgcgaagtttgcgacttattactcctggcgcagggcaaactggatgaagccaaagggcaaagcatatgagtaaagccagacgttgggttatcattgtgctaagtctggcggttctggtgatgatcggcattaatatggccgaaaaagacgataccgcccaggtggtcgtcaacaacaatgatcccacctataaaagcgagcatacggacacgctcgtctataacccagaaggggcactaagctatcgattgattgctcaacacgttgaatattattccgatcaggccgttagctggtttacgcagccggtacttaccacgtttgataaggataaaatcccgacatggtccgtaaaagcagataaagccaagctgaccaatgaccggatgctctatttatatggacacgttgaagtcaacgcacttgtgccagactctcaacttcgcagaatcacgacggataacgcgcagatcaatctggtgacgcaggatgttacctctgaagacctcgtcacgttatacggaacaacatttaactccagcggtctgaaaatgcgcggcaacttacgcagcaagaacgccgagctgattgaaaaggttagaacatcctatgaaattcaaaacaaacaaactcagccttaatcttgtgcttgccagcagtcttctggccgccagcattccggcatttgccgtaaccggagacactgatcagccgatccacattgaaagcgaccagcaatctcttgatatgcaaggcaacgtggttacctttaccggtaatgtcatcgtcacccagggcaccatcaaaattaatgccgacaaagtggtcgttacccgtccgggcggcgaacaaggtaaagaagtgattgacggctacggtaaaccggcaacgttctaccagatgcaggacaacggtaaacccgttgaaggtcacgcttcccagatgcactacgaactggcaaaagattttgtcgttctgacgggtaatgcttatctgcagcaggtcgatagcaacattaagggcgataagatcacttacctggtgaaagagcagaaaatgcaggctttcagcgacaaaggcaagcgcgtaacaaccgttctggtgccgagccagctgcaggacaaaaacaacaaaggccagaccccggcacagaagaagggtaattaattcgttatggcaacattaactgcaaagaaccttgcaaaagcctataaaggccgtcgcgtggtagaagacgtcagcctgaccgtcaactccggggaaattgtcggtctgctggggccaaacggtgccggtaagaccaccactttctacatggttgtaggcattgtgccgcgcgatgcgggcaacatcattattgatgatgacgatatcagtctgctgcctctgcatgcacgcgcgcgccgcggtatcggctatctgccacaggaagcctccattttccgtcgcctcagcgtttacgataacctgatggcggtactgcaaattcgtgacgacttgtctgctgaacaacgtgaagaccgcgcgaacgagctgatggaagagtttcacattgagcacctgcgtgacagcatggggcagagtctctccgggggtgaacgtcgccgtgtagaaattgcccgcgcactggctgcgaatccgaaatttattctgctcgacgaaccgtttgccggggttgacccgatcagcgttatcgacattaaacgcatcattgagcacctgcgcgacagcggcctgggcgtgctgatcactgaccacaacgtgcgtgaaacactggcggtttgtgaacgcgcttatatcgtcagtcaggggcatttgatcgcccacggcacgcctacagaaatcttacaagacgaacacgttaagcgtgtataccttggggaagacttcagactctgatagggtagaagtttgcgacgttttagcaggagagtacgattctgaacatgaagcaaggtttgcaactcaggcttagccaacaactggcgatgacgccacagctccaacaggcaattcgtctgttgcagttgagcacgctggaacttcagcaggagctacagcaggcgctggagagtaatccgctgcttgagcaaatcgacactcatgaagaaatcgacacccgcgaaacgcaagacagtgaaacgctggacaccgccgacgcgctcgaacaaaaagagatgccggaagagctgccgctcgatgccagttgggacaccatttacaccgctggtacaccatccggcaccagcggtgactacattgacgacgagctgccggtctaccagggcgaaacgacgcagaccttgcaggattacctgatgtggcaggttgagctgacaccgttttccgacactgaccgcgctattgctacctctatcgtcgatgccgttgatgaaaccggttatctgactgtcccgctggaagatattctcgaaagtataggcgatgaagagatcgacatcgacgaagttgaagccgtccttaagcggatccaacggtttgatccggtcggtgtggcggcaaaagatctgcgtgactgtctgctgatccaactctcccaattcgataagaccacgccgtggctggaagaggccagactgatcattagcgatcatctcgatctgttagccaatcacgacttccgcactttaatgcgcgtcacgcgtctgaaagaagatgtgctgaaagaagccgtcaatctgatccagagcctcgatccgcgccccgggcagagcatccagactggcgaacctgagtatgtcattccagatgtgctggtgcgtaagcataacggtcactggacggtagaactcaacagtgacagcattccgcgtctgcaaatcaaccagcactacgccagcatgtgcaataacgcgcgcaacgatggtgacagccagtttatccgcagcaatctgcaggatgccaaatggttgatcaagagtctggaaagccgtaacgatacgctactgcgcgtgagtcgctgtatcgttgaacagcagcaagccttctttgagcaaggtgaagaatatatgaaaccgatggtactggccgatatcgcccaggctgtcgaaatgcatgaaagcacgatatctcgcgtgaccacgcaaaaatacctgcatagtccacgaggcatttttgaactgaagtatttcttttccagtcacgtcaataccgagggcggcggcgaagcttcctccacggcgattcgtgcgctggtgaagaaattaatcgcggcggaaaacccagcgaaaccgttgagcgacagcaagttaacctctttgctgagcgaacaaggtatcatggtggcacgccgcactgttgcgaagtaccgagagtctttatccattccgccgagtaaccagcgtaaacaactcgtttgacccaaccgataaggaagacactatgcagctcaacattaccggaaataacgtcgagatcaccgaggcactgcgcgaatttgttacagccaaatttgccaaacttgagcaatattttgaccgaatcaaccaggtctatgttgttctgaaagtggagaaagtcacccacaccagtgatgcaacactgcatgtaaacggtggtgaaattcatgccagcgcggaaggtcaggacatgtacgctgccattgatggcttaattgataagctggcacgccagttgaccaaacataaagataaactgaaacaacactaattgtccgggcaattagcatgtgcatggcggtctgttgtgcggcacaacgggccatttgtacggttaatgctccgagcctgttccactgtttgagtgggcaggttcttaggtgaaattatgacaaataatgatacaactctacagcttagcagtgttcttaacagggaatgtacgcgaagccgcgtccactgtcagagcaaaaaacgcgccctggaaatcatcagcgagctggcggcgaaacaacttagcctgccgcctcaggtggtttttgaagctatcctgacgcgggaaaaaatgggcagtaccggtatcggcaatggtattgccattccgcatggcaaactggaagaagatactctgcgcgccgttggcgttttcgttcagctcgaaacgcctatagctttcgatgccatcgacaaccaaccggtggacttactttttgccctgctggtgccggcagaccaaactaaaacgcacctgcatactctgagcctggtggcgaaacgtctggcggacaaaaccatctgccgccgtttacgcgcagcccagagcgatgaagagctgtatcaaatcattacggataccgaaggtactccggatgaagcgtaattattcggtaatgtctcttttagacgttgtgaggagaaacagtacatggtactgatgatcgtcagcggacgtagtggtagtggtaaatctgtcgccctgcgtgcgctggaagatatgggtttttactgcgtggataaccttcccgtagtgttgttacccgatctggctcgaaccctggccgatcgcgagatttctgccgccgtcagcattgatgttcgtaatatgccggagagtccagaaatattcgaacaggcgatgagtaacctgcctgacgctttcagtccgcaactcctgttcctggatgccgaccgtaataccttaattcgtcgttacagtgacacgcgccgactgcatccgctttccagcaaaaacctgagcctggaaagtgctatcgacaaagaaagcgatttgctggagcctctgcgtagccgagcggatctgattgtcgataccagtgaaatgtccgttcacgagctggctgaaatgctgcgtacccgtctgctgggtaaacgtgaacgcgaactgaccatggtctttgagtctttcggcttcaaacacggtatccctatcgatgcagattacgtctttgacgtgcgcttcttgccgaacccgcactgggatccgaaactgcgtccaatgacaggtcttgataaacctgtcgccgcgttcctcgaccgccacacagaagtacacaattttatctaccagacgcgaagctatcttgagctatggttacctatgctggaaaccaacaaccgtagctacttgacggtcgccattggttgtaccggcgggaagcaccgtagcgtgtatattgcagagcaactggcagactacttccgcagccgcggtaaaaacgtccagagtcgccatcgtacgctggaaaaacgtaaaccatgaccgtcaagcaaactgttgaaatcacaaacaagctgggcatgcatgcccggcctgcaatgaagctgtttgaattaatgcagggttttgacgctgaagtgctcttacgtaatgacgaaggcaccgaggctgaagccaacagcgttattgcgctgctgatgttggattctgccaaaggacggcagattgaagttgaagcgaccggtccacaggaagaggaagcactggccgccgttatcgccctctttaattctggttttgatgaagattaatcttcatcactttgacatacaactcccttcaaactccccccgacaataagaaaatcacgtactgaaatcgttctcaatcaacgtcatttgtacattttgtgcgcttttcactttcagaagaaccttaagaaaaccttaagaggcattgtttaggttttgtttaagttaatcgaccatactggagatcgtcagaaaatatttccaggagatggcatgattcgcttatctgaacaaagtcccctgggcaccggaagacatcggaaatgttatgcgcatccggaagatgcccaacgctgtatcaagattgtctaccatcgtggcgatggtggcgataaagagatccgccgtgagttaaagtactacgcgcatcttggtcgccggttaaaagactggagtggaataccgcgctatcacggtaccgttgagacggattgcggaaccggttatgtctacgatgtgattgcagattttgacggcaagccttccattacgctgaccgaatttgctgaacaatgccgttacgaagaagacattgcacaactgcgccagctactgaaacagctgaagcgttatttgcaggataaccgtatcgtgacgatgagcctgaagccgcagaatatcctctgtcaccgcatcagtgagagtgaggttatcccggtcgtctgcgacaacattggtgaaagcacattgattccactggcgacctggagcaagtggtgttgtctgcgtaagcaagagcggttatggaaacgatttatcgcccaaccggcgctggctattgccctgcagaaagatctgcaacctcgtgagagcaaaacgctggccctcactagccgcgaagcttaatccagctggtgttgttgcataaacggctcaccgcctaactgatacatctgccgtaaaatccacgcctgacggctacgcacgtagccgcttgggctggagactttgaaacgaagtggattaggtaatacagctgccagtaatgcagcttcgctccgggtaagtttgctcgcgggtttgtggaaataacgttgtgccgcagcttcgacgccaaacacaccgtcgccaaattcggcgatattcaggtaaaccgtcaggatacgctttttgctccagaccgtttctatccccagcgttaatccggcttccagcccttttcgaacccagctacgcccatcccataaaaagagatttttggctgtctgttgagaaatcgtactagcaccgcgaatacggttttcattgcgctcgttgtgcgccagggctttctcaatggaagcgacatcaaagccccagtgctcaggaaatttctgatcttctgcggcaatcaccgccagtcccatccacgggctgatttgatccatactgacccagtcagaatgtgccacgtaacgaaaattgccatgcagccaggcgctgacctgtcgctcgaccattaccgcactgaagggaacaggcgcaacgctaaacaacgcgatgcccccgccccagaaaacggcgaggacaaccattaaccgcaaaagaaaacggcgaacgaaactaaacaccgttaagcggcttttactcattcagccagaaccagcacgcgggaaaccagcttatcaatgccgctcgccgcttctgcaatgttctgcgccagcatatatgctggggtggtgacaatcttattgtcttcatcaaccacgatatcatcgacaggacacggcacatgctccgcgcccatctcttccagcacttctgcggtatcgatatcagtaccgatggtcaaacgcagcgggaaatcgaaaattttcggcagcatcgccggggcaatacacataaaaccaagcggttttccggcctgatgcatcgcttgtgccagcgcctttaattcacggtcaacggtgcattcgctaccaagactggcaaaattgcttaaattcttcgccgcgccaaacccccccggcacaatcaacgcatccagttcagcggcatcggcctgggccagaggacggatttcaccgcgcgttattcgtgccgcttcaatcagcacattgcgcgtttccgtcatcgcttcgccagttaaatggttgataacatcaacctgctgcttatccggtgcaaagcagaccgcctgcgcaccgctgcgactaatagctaacaacgtcaacaccgcttcatgaatttcagaaccgtcatagacgccgcatccgctcagaattacgccaattttcttcattgtgatcatcctttcgcaattgactgaaacacattaatttttttaataaaaatggtacgcatcacacatttaactgattcatgtaacaaatcatttaagttttgctatcttaactgcgtgcggcctgaaaaacagtgctgtgcccttgtaactcatcataataatttacggcgcagccaagatttccctggtgttggcgcagtattcgcgcaccccggtctagccggggtcattttttagtggcttttgccacccacgctttcagcacttctacgtcgtgacgccactcttctttcatctcttcaatccattcaccgacgttatcttcccaggccggaaggtcaggagactgaatttgctgacccagctgttgcagatggcgtaaccccacactccccgccgcacctttaattttatgtccttcctcaacaatgccttttttatcctgcgccgtcagattgctctccagcacgctgacatagcccggcatcatcttctcaaacaccgctaacccgtcggtgatcagcttcggtcctacaagttcgagatactgttccagcatgggaatatcgagcaatgcttcacttttactgttctcttctgtcgtcaccgtactctcctcatcatcctgggtatcccagaatttcttgatcatcgcggttagcgccggaacagaaagcggcttactcagcacatcatccattccagcattgaggtactcttgtttgtctttcagcacgttagcggttaaggccaccagcggcggtaaatcctcgcgcggataacgtttcgtcagttcacgagagatatccagcccggtcatatctggcaactgaatatccagcaacaccaggtcgtattcgcccggtttaaacatctccagcgccgccttgccggtcatggcgacatcaacgctgttacctaatttttccagcacagaacgcgcaacaatcacgttcagttcaatgtcttccaccagcagcacattcagcgccggtaaaggcatatcgtcttcatcaaacgcatcatcgacctcttctgctacgctcggtgcgtggatcgtcaacgtaaaggtactacctttgccctgttcgctggtaaccgtaatatcgccgcccatatttttcgccagacgacgagaaacggccagaccaataccggtgccggtggcaggtttaccgccatgactgtctttcacctggtaatacatggcgaaaattttatccagctcatcctgcggaatgccgataccagagtcttccacttcaaaatgcagcatatcgccttcatcgtagcgcacgcgcacggtaacctggccttgctgggtgaatttgacggcgttactgatgaggttccacaggatctgccgtaaacgcgtcccgtcggtaatgacctgatgcggtaatggcagcgtcggctccaggttaaagcgcaatcctttttgttgcgcctgcaatgcggagagattttccagatcggcaaggaagctggtgaaatcaaccggttgattatcaagctggaccttgcgccgttccatcttatccatgtcgataatatcgttaaagatattccccagcgtgacggcgctaacatggatggtcttgagatatttttcctgctcggcggtgagttcggtatccagcagaatgcggctcagaccgacgataccgttcagcggtgtacgcaattcgtgactgatggtggagataaacgtcgttttgtcgcggctggcccgttcaagcgcatcctgataccgcttacgctcggtaatgtcgcgaccaaagcccatcaaaccgtgacgtttacccacgcggtcgtagtacggcactttacggatttcaaagcaggctttgcgcccgtccgggtaatccagccactgttcataggtcagactcacattatgacggaacactttttcatcggtttcaatgacttttgcggcggcttccggactgtaaacatcagcaggtttcaggtgaaccagttgtttttcgctttttccggtcagcagctccatcgcgcggttacagccggaaaactctttatcttcgttacgataaaaaaccaggtcgggactagcatcaaggaaggaacgtaagaaactggattgctgctcgagctgaatttgtgtctcttcgcgctctttgatttcaattttcagttggccgaaggtttcctgcagttctgcttccgctttttcacgaacggcaatttcctgatttagctgggcaatattatcttttaactgaacgttgaggctcaaatcgcgctcgcgcatctcctccagtttttgcaccagccgactcagacgttgtcgactctcctccagttgctcgacgaccacgcttagaaagtagaccgcccacggcgtaatcagcaaaccaaagaagatagaacgaataacatcaatgctttcgacctgaccatgcagcaccatggttaccgccatttgtaccacaatggcaagaacgacgagggccagcgccagcaacatactgaagcgcaccagacctaacttcatcatcaggtcaacataatactgcgccagcagacgaatttgcttcattagggaattccttcacgacaacctgccccaataatacccaattctgacagttacgttataaattgtgtgagaaatgcggaattcccctcaacgacttactccgttggaggtagccacggacgtcccagcgcgcttccctgtacgccatgttcattcagatagcgatccagctcgaccattcccgtccatcgattttcgcaccacagcggagcaagcagcgtcgggcgacgggcgctggcggaaatgcggtggtagatcacttccggtggcgtatggcgaatcatttctccggcagtgagcgtgtaatcctccagttcaataccgttcaaacgccccgcttcccaggctttcgccataatgctgcctttcacaatatgcagcggatgcagctttatgccgtccacgccggtttcaaccactcgctccagcgtttgcaaacattcagcctgcccttcgccaggcaggccgacaattaagtgggaacacaccttcagcccgcgctgacgtgccagctgggttgtacgctgataacaggcaaaatcatggccgcggttgatgcgatgcagtgttttgtcgtgggcggtttgtagccccagctccagccacacttcgtaaccctggtccttatattcgcaaagcagatccagcaccgcatccggcacgcagtccgggcgggtacccacacacaaaccgacaatattggcctggctcaccgcctgctgatacatagaacgcagcacctgaacttccgcaaaggtgctggtatacgcctgaaagtaggccagatagcgtttagcgcggttaactaaattcgcctggtgcgccagttgctcggcaatggaacgatgctgctgcgcttcatcggcaaagctggcaacattacagaatgtgcagccaccacgcccgatggtaccgtcacggttagggcagctaaaaccgccgtgcagcgtcagcttatgcaccttttgcccataacgacgggtgagatcaccaccaaacatattgactaatttctgtaactgcataatctgatagaccgcgccttgaaaagaggccaaagcctgccatttttagctcaattcggcgatgacctggatcaatcgtcccggcctgcttttatcaactgcataatcaatcaaaattaccgaaatttcatgcataatcacataaatcacttttgcttatcttgtgtcagatttttttatctcctgatggattttaggcaaaaacagtagcatgaaacgtcattaccaattaaggcagtataaaatgctggttttgtcgtcagttcaaggcaggataagggttaacacacctttatgacagtcaggaattgactgtttctctaacgacttcccttttagccttaaagataaaatccattttaatttcagtcatttaataaagaattttgcgctaaagcacatttctgtaccaataagcttgccatttgacctgtatcagctttcccgataagttggaaatccgctggaagctttctggatgagcagcctgctcatcatatttatgcagtaattgagatcccctcttcaccgtattaaccgatgcgaaaaggacaacaagggggcgaatgcgaggcgcgcgtatgacacgcaaaccccgtcgccacgctctttctgtgcccgtgcgcagcggtagcgaagtggggttcccgcagagcctgggggaggttcacgatatgttgtacgataaatcccttgagagggataactgtggtttcggcctgatcgcccacatagaaggcgaacctagccacaaggtagtgcgtactgcaatacacgcactggcccgcatgcagcaccgtggcgcgattctcgccgatggtaaaaccggcgacggttgcggcttgctgttacaaaaaccggatcgcttttttcgcatcgttgcgcaggagcgcggctggcgtttagcaaaaaactacgctgtcgggatgctcttcctgaataaagatcctgaactcgccgctgccgcacgccgcatcgttgaagaagaactgcaacgcgaaaccttgagcattgtgggctggcgtgatgtccccactaacgaaggcgtgctgggtgaaatcgccctctcctctctgccacgcattgagcaaatttttgtgaacgccccggcaggctggcgtccacgcgatatggagcgccgtctgtttatcgcccgccgccgcattgaaaagcgtctcgaagccgacaaagacttctacgtctgtagcctgagcaatctggtgaacatctataaaggtctgtgtatgccgacggatctgccgcgcttttatctggatcttgcggacctgcgtctggaaagcgccatttgcctgttccaccagcgcttctccactaacaccgtaccgcgctggccgctggcgcaaccgttccgctatctggcgcataacggtgaaatcaacaccatcaccggtaaccgccaatgggcgcgtgcgcgtacttataaattccagacaccgcttatccctgacctgcacgacgccgcaccgttcgtcaacgaaaccggctctgactccagtagcatggataacatgctggaactgctgctggcaggcgggatggatatcatccgcgccatgcgtctattagtaccacccgcctggcagaacaacccggatatggacccggaactgcgtgccttctttgactttaactccatgcatatggagccgtgggatggcccggcgggcatcgtgatgtccgacggtcgttttgccgcctgtaacctcgaccgtaacggtctgcgtccggcgcgctacgtcatcaccaaagataagctcatcacctgcgcctctgaagtcggtatctgggattaccagcctgacgaagtggtcgaaaaaggccgcgtcgggccaggcgaactgatggttatcgacacccgcagtgggcgtattctgcacagcgcagaaaccgatgacgatctgaaaagccgccatccatataaagagtggatggagaaaaacgtccgccgactggtaccgtttgaagatctgcccgatgaagaagtgggtagccgcgaactggacgacgacacgcttgccagctaccagaaacagtttaactacagcgcggaagagctggactccgtaattcgcgtactgggcgaaaacggtcaggaagcggtcggtagcatgggcgatgataccccattcgccgtgctctccagtcagccgcgcattatttacgactacttccgccagcagtttgcccaggtgactaacccgccaatcgacccgctgcgtgaagcgcatgttatgagcctcgccaccagtatcggtcgtgaaatgaacgtcttttgcgaagcagagggccaggcgcaccgtttaagctttaaaagcccgattctgctctactccgatttcaaacagctcacgacgatgaaagaggagcactaccgcgcagatacgctggatatcacctttgacgtcactaaaaccacgctcgaagcgacagtcaaagagctgtgcgacaaagccgaaaaaatggtacgtagcggcaccgtgctgctggtgctctccgaccggaatatcgctaaagatcgcctgccggttccagccccgatggcggttggcgcgatccagacccgtctggtcgatcaaagcctgcgttgcgatgccaacatcatcgtcgaaaccgccagcgcccgcgatccgcaccacttcgccgtgttgctgggcttcggcgcgacggctatttatccataccttgcctatgaaacgctgggccgcctggtagacacccatgcgattgccaaagattatcgtaccgtgatgctcaactaccgtaacggcatcaacaaaggcttgtacaaaatcatgtccaaaatgggcatctccaccatcgcctcttaccgctgcagcaaactgtttgaagcggtcggtctacacgatgatgtagtgggcctgtgcttccagggggcggtcagccgcattggtggagcaagctttgaagacttccagcaggatctgctgaatctgagcaaacgtgcctggctggcgcgtaagcccatcagccagggcggtctgctgaaatacgtccacggcggcgaataccacgcctacaacccggacgtggtgcgcacgctgcaacaagcggtacaaagcggcgagtacagcgactatcaggaatacgcgaagctggttaatgagcgtccggcaaccacgctgcgcgatctgctggcaattacgccgggtgaaaacgcggtcaacattgctgatgttgaaccggcaagcgaactgtttaaacgctttgataccgccgcgatgtctatcggcgcgttaagcccggaagcccacgaggcgctggcggaagcgatgaacagcatcggcggtaatagcaactccggtgaaggcggcgaagacccggcgcgctacggcaccaacaaagtgagccgcatcaagcaggtggcttccggtcgctttggggttactccggcgtatctggtcaatgccgacgtcattcagattaaagtcgcccagggcgcgaagccaggcgaaggcggtcagttgccgggtgataaagtcacgccttacatcgccaaactgcgctatagcgtgcccggagtgacgctgatctccccgccgccgcaccacgatatctactctatcgaggacttagcgcagctcattttcgacctcaagcaggttaacccgaaagcgatgatctccgtgaagctggtttccgaaccgggagtaggcaccatcgcgactggcgtggcaaaagcttatgcggacttgatcaccatcgcaggctatgacggcggcaccggcgcaagtccgcttagtagcgtgaaatacgcaggctgtccgtgggagctggggcttgttgaaacccagcaggcgctggttgctaacggcttgcgtcacaagatccgtttgcaggtcgatggcggcctgaaaacgggtgtcgatatcatcaaggcggcgattctcggcgcagaaagcttcggcttcggcactggcccgatggtggcgctcggctgtaaatatctacgtatttgccatctgaacaactgcgcaacgggtgtagcaactcaggatgacaaactgcgtaagaaccactatcacggcctgccattcaaggtgacgaattactttgagtttatcgcccgtgaaacccgcgagctgatggcacagcttggcgtaacacgtctggtggatctgattggtcgcaccgacctgctgaaagagctggacggtttcaccgccaaacagcagaagctggcgctgagcaagctgctggagactgccgaaccgcatccaggtaaggcactctactgcaccgaaaacaacccgccgtttgataacggcctgctgaacgcgcagttgctgcaacaggcgaaaccgtttgtcgatgagcgccagagcaaaaccttctggttcgatattcgcaacaccgaccgttctgtcggcgcgagccttagtggctatatcgcccagacgcacggcgatcaggggctggcagccgatcctatcaaagcgtacttcaacggcaccgcaggccagagcttcggcgtgtggaacgcgggcggcgtggaactgtacctgaccggtgatgccaacgactatgtcggtaaaggcatggcgggcggcttaatcgccattcgtcctccggttggttccgccttccgcagccatgaagcaagcattatcggcaacacctgcctgtatggcgcgaccggtggtcgtctgtatgccgcaggccgcgcgggtgaacgtttcggcgtgcgtaactccggtgctatcaccgtggtagaaggcattggcgacaacggttgtgaatatatgacgggtggtatcgtctgcattctgggtaaaaccggcgttaacttcggtgcgggcatgaccggcggtttcgcttacgttctcgatgaaagcggcgatttccgcaaacgcgttaacccggaactggtcgaggtcttaagcgttgacgctctggcgatccatgaagagcatctgcgtggtcttatcaccgagcatgtgcagcataccggctctcagcgcggtgaagagattctggcgaactggagtaccttcgccactaaatttgcgctggttaaaccgaagtccagtgatgtaaaagcactgctgggtcaccgtagtcgtagcgcagctgagttgcgcgtgcaggcgcagtaaggggtagcaacaatgagtcagaatgtttatcaatttatcgacctgcagcgcgttgatccgccaaagaaaccgctgaagatccgcaaaattgagtttgttgaaatttacgagccgttttccgaaggccaggccaaagcgcaggctgaccgctgcctgagctgcggcaacccatactgcgagtggaaatgcccggtacacaactacatcccgaactggctgaagctcgccaacgaggggcgtatttttgaagcggcggaactgagccaccagaccaacaccctgccggaagtttgcggacgagtctgcccgcaagaccgtctgtgcgaaggttcctgcactctgaacgatgagtttggcgcggtgaccatcggcaacattgagcgctatatcaacgataaagcgttcgagatgggctggcgtccggatatgtctggtgtgaaacagaccggtaaaaaagtggcgattatcggcgcaggcccggcaggtctggcgtgtgcggatgtcctgacgcgtaacggcgtaaaagccgttgtcttcgaccgtcatccagaaattggcgggctgctgaccttcggtattccggccttcaagctggaaaaagaggtaatgacgcgtcgccgtgaaatcttcaccggcatgggtattgaattcaaactcaataccgaagtgggccgcgacgtacagctggacgatctgctgagtgattacgatgccgtgttccttggcgtcgggacttatcagagtatgcgcggcgggctggaaaacgaagacgccgatggcgtgtacgcagcgctgccgttcctcatcgccaacaccaaacagttaatgggctttggtgaaacccgcgacgaaccgttcgtcagcatggaaggcaaacgcgtggtggtccttggcggtggcgacactgcgatggactgcgtgcgtacgtccgtgcgccagggagcgaagcacgttacctgtgcctatcgtcgtgatgaagagaacatgccgggttcccgccgcgaagtgaaaaacgcgcgggaagaaggcgtagagttcaaattcaacgtccagccgctgggtattgaagtgaacggtaacggcaaagtcagcggcgtaaaaatggtgcgtaccgaaatgggcgaaccggacgccaaaggccgtcgccgcgcggagatcgttgcaggttccgaacatatcgttccggcagatgcggtgatcatggcgtttggtttccgtccacacaacatggaatggctggcaaaacacagcgtcgagctggatagtcaaggccgcatcatcgccccggaaggcagcgacaacgccttccagaccagcaacccgaaaatctttgctggcggcgatatcgtccgtggttccgatctggtggtgaccgctattgccgaaggtcgtaaggcggcagacggtattatgaactggctggaagtttaagcgaggtaacaatgaattcgccagactgtgtctggcgaatcaaattactgacgaagtgcgcgttgttttctggcaaatgcggcatgagcgtttgacctttcctataatagggataattttcaataaattgtgctttgttcaccaagtctgatgagtgaagcacatcaagcaatttctcatttacaatccgtctcaattacttgttaacacctctgacaataccgattctgcaagctattcagtcttttcattccatgtaaattgtctcgatattaatatacaaaatatgaatataaaaaaccaatatattatccttaattatctatatattttcctatttttcagcgcaaacattcatgtaatgaataattatcaccacaaaccacctcaccagcaccttattattcacatgatcgtaactataaaattcattaaataaatacatcccagcaagttggctatttctgaacgagttatttatttacattcacaaacagatatatatactgcttcagctttttattttaaaaaataaatttgttattaaggatatgttcatatgtttttcaaaaagaacctcacaacagctgctatttgtgcagcactttctgttgcagcattcagtgccatggcaacagatagtactgatacagaattaactatcatcggcgagtatacccctggtgcatgtaccccagttgttacgggcggcggcattgttgactatgggaaacatcataacagtgcgctgaatccgaccggtaaaagtaataaactggttcaactgggccgcaaaaacagcacattaaatataacctgcacagcaccaacgctaattgctgtaacctccaaggataaccgtcagagcaccattgtagcgttaaacgacacatcctatattgaaaaagcttatgatactctcgtagatatgaagggaacgaaaaacgcctttggtttaggttctgcgcctaatggacaaaaaattggcgctgcatccattggtattgacaggtctaatggtgggattcacgcggcggacgatacaggtgaaattcctgtcgacctgattcaaactgaccactggagtgcagcgacccccacatggaaagccagttctaatggcgcattctgcagcctgacaagttgcagtgcaatcgagcgcggttattctgttgcaaaaacaggggaactgacacctgttgctattacagcggtcaccttcccgttactgattgatgctgcggtaaatgacaatactattcttggttctgatgaaacgatcaaactggatggtaacgtcactatcagcgttcagtatttataagaacttgtaatacagtttttatttttacgcattaaccagttagctataactcggacagattatgccctatgacatggtctgtcttaatcaatctcatcgcaaacagtgcataacatatattaacaatatgtttctgcgttatttatcattattacaggagttttaatttaaatgctcagacacattacattcactgtatttataacaacatcaatgaatactaacaatgccggacaggagtactatcaggcattcgttttatacgatcggttaatgtttcaggaaagctcttcgcatatcttggggaaagtaaatgtaatacgctgttcttaattgttcagtgctcaccccccagagtatagctcattccattattcaacttagctccatataaagggacagataatggaaagcctcagtgaaggaaccacagcaggctaccagcaaatccacgacggtattattcatctggtcgatagcgcccggacggaaacggtacgtagcgttaacgcgttaatgaccgcgacgtaccaggaaattggccgacgaattgtcgaatttgaacaaggtggcgaggccagggctgcgtatggtgcgcagctaatcaagcgactaagtaaggatttatgtctaaggtataagcgtgggttctctgcaaaaaacttacgccaaatgaggcttttttacctcttttttcaacatgttgaaattcaccagacaatgtctggcgaattaacaccattgggaattccgcagacaccgtctgcagaattcccaagcgcaaagatttggcagacgctgtctgccaaatctttccccttgcccaggtccacctacgtccgtttactttccgttaaaaacgctgacgcccgcagcttttatgaaaaagagacgctccgctgtggctggtctgttcgccagctagagcggcaaattgcgacccagttttatgagcggacactactgagtcatgacaaaagtgccatgctgcaacaacacgctcctgccgagacgcatattcttccgcaacaggcgatacgcgatccctttgtgctcgaatttctggaattgaaagatgaatatagtgaatccgattttgaggaggcgctgatcaaccacctgatggatttcatgctggaacttggggatgattttgcctttgttggtcggcagcgaaggttacgcattgatgacaactggtttcgtgtcgatctgctgtttttccaccgccgtttacgctgcctgctaatcgtcgatctaaaagtgggcaaattcagctatagcgatgccggacagatgaatatgtatctcaactacgccaaagagcactggacgctaccggatgaaaatccgcccatcggtctggttctctgtgcagagaaaggagccggagaagcgcattatgctctggcaggtttgcctaacaccgttctggcaagcgaatataagatgcaactacctgatgagaaacgactcgcagatgaactcgttcgaacacaggcggtgctagaggaaggctatagacgccgttaatttcagcggtttcgaattctgcagacagtgtctgcagaatctttaaaacgaactaagttttaagccattaaatcagccttaaccttcaccacaacctttttaatctctccaggctcgccgacaacgcatcctggtttatgcggttcacctggcataaacacggcgaacattcccggttttaagatgatggcttgctcgttatcaatggtgctgcaaagctgataatcatcctcatggtggaactcttcacactgacgcgcagtgcctgccatgccaaacagaatccgttcctcaccgtttaataacagctggatatcaatgtattgctcgtgcaattccgcttttttctcgacggggctttgagtgttaaacgtcatgacattcataaagatattgtcgccctgtaattcgtaacgacccggcgctttttcttgcggtctggcagctaatgccagcgttaacgcgtcctgtaacgcaggatgtaacccagcagacggtaaactctgtacttcacccatcatcataatttttctccctgggccaacagcgcagccccaagtaaacctgcatcatggcggtaatgcgccgccagtaaatcaacatgaaatgccgctggctcctgcgccagatacgtttccaccagcgccagatacccttctgccagaccaacgctgccaccgaccaccacgcactggcaatcagttgtggctttaatatcagcgatcagccttgcaagcgtacgtgcggagcggtgaatcagctgctgcgcctgctcgtcaccctgcccggcgcgcgtgaaaatagttttcgcatccgcgccagccaactccccctgcgctgccgctgcaatgccgcgaccagaagcaatcgcttccacgcaacctgtgcgtccacagccgcagactgggccgtgtggatcggcaagcgtatgcccgatatgccccgccagaccgccagggccggtaagcagtttgcagccgctcactacaccgccgccaacgccggtggaaacggtgataaagaccatatcggttatatcgccatccagcgcctgaaactccgcccatgctgcggcctgcgcgtcgttaatggcaatggtcggcaaattggtaagttgttccagcgttttgactaacggaaagtgtagcaatccaccaagattatgcggattaagcgccagcaagctgccgtcacggattatcccggtgctagcgatggcaacccgctgcgcatgagcttgcaacggagagactaatgcggataaggcatcacgcaaggcttctggtgtctggctggctggcgtaggaagttcacgacgatcgcggatctgcccgtcagcgccaatcagcgcggcggcaagtttagtaccgccgatatcaatcgccagtgtggtcatagcaccgcctttttcatcgctgtgttgtaccactgacaaatgtgctcaagacgcgtgattgcagaaccgaccgtcaccgcccacgcgccgtggcgcatcgcatccgccgcctgagcaggcgtgttgtaacgcccttcggcaatcacccgacatccggcgtcgctcaacgttttcaccagcgccagatccggctcttctggcgtttcaggcgtggtatagccagaaagcgtagtgccaataatttcggctcccagcttttggcatgccaggccgtcttccggcgtactgcagtcggtcatcgccagtaaaccgtgatggtgaatacgtgccagcagcgtttcaacaggcaccggacgcgggcggtcggtgccgtcaatggcgataatgtccgcgcccgcctgcgccagcgcatcaacatcttcaatataggccgtgatgcgtaccggagaatcctccagatcgcgtttcacaattccaataatcggcacgctcaccaccgcacgcgtggcttgcagatttgccacaccttcaatgcgaatggcaaccgcgcccgcctgttctgccgctaatgccatggcggcgacgatttcgggtttatcgagcgggctgtccggaaccggctggcaggagacaatcaggccaccgttagcagcgattttttgatccagttgtgcaagtaagctcatacatcttcccttagcgaaaggcccggtacatagaccgggcaacaggattaacttttggttttgactaaatcgtttttggcgctgccaaacggcacggcaccgctgaatggtttaccgtcgatagcgtcatgagtacgcaacgcttccgggcgcaaccaacgctgaacgcgagaaggcatatccagcccaatcagcaggatcaccacgaacgtcagactgaagctgaggcttgccagcgcagtacccagatccagacgttgagcgatcaacgcgccgatgattggggccagtgcaccgcccaatgcgccaacgttgtaggtaaagcccaggcccgctgcacgctggtcggtatcgaaataaccgccaatcagttttggtaagatcccggcgatcccttgtccaagcatttgctggaagaacagtaacagaccgagcacccagacgtttgcgccgccaatcgcaaataccggaataatcagcagctggctggccagcaggctacaaacgtacgctttgcgggttcccagccagtcaccgaggaagccacctacgcagcatcccaccgccgcgccaaagccactaaagaacagcacattggctacagtatgcgggttataagccagatcggttttcagatacgttggcagcagcgcctgaatcggccaactgtagaggaaagcaaacaacacgaccaccatcagcattacgcccgttggccagcgtttgcctgcactctgcaccataaagctgataaagattgcggcgcataacagcccaagaacagcgacgatcgcggcattttgcaggttaccggcgaagcagaaccacagcgcagtagccgccgccagtgtcattacgatattggcaatgcgatgttcaccacggtagagaatatccaccattgtgcgtactggtgctttacctgcgtgtttctctttccagtcttccgcttccgggatgtttttacgcagccagagagcaaagatgattggcaaaatgccgataaagaacagcgcacgccagccccagaccggaaccaccaggctatagacctgagcggcaacgacggcccccacagagaagccactaatcaaaaaaccactggctttgttacgcagatgttttggccagctttcaatgacataggtggcgctggaaccgtattcacccgccatccccatgccgatgaccagacgagcgataaacatggtgatgtagcctggcgcaaagccgcaggccagcgtcccggcgctgaagagaacgatgctggtgaccattgccagacgacgcccgtagcggtcacccatagcgccgagcatcaggccgccgaaccagcgagagataaaggctgcagagatcagacttgccgcctgcaccgtcgtcagcccgaattcaccttgtacttcggtgagtaccagggcgattaaaacgaaatcaaaaccgtcaagcagatatcccaaccaggcagcggaaaatgcgcgccattgtgcacggttgagatggcgataccacgggatattctgggttgtagtactcattgtgagtctcccgcggtgggcgatgcccacacgctttggtatgaaaattgtagggtacagatgcgtttatttcccctcacccggtaggggcgagcgaggggaaacaactcacccgcgctcttgcatcaactgctgggccagcgccttcagttctggcagatatttttcatctaccggtccaaacggtttgcggcacagcggcacagaaacgacatccatataatggaggacagttttcaggccgcggaatacgcccgttttgatcagtaaatcaatgactttattgcattcagtttgcagtttctgcgcggtctggatatcgccttctttcagcgccttaacgatcccctgatagcgccagcccatgatgttgtaggtactgccgataccaccatcagcgcccgccagcagaccagaggcgaagatttcgtcgtaaccgttatagagcacaagatcaggatgttcacgacggatctgctccatctgatagagatcgccagaggtctgtttcagcgcacctacgccaggcaatgtaacaagtgtgttgatctgatccagggtcagttttaccccactcagggctggaatgttgtacaccaccatcggcaaaccatccgcgctatcaataattgcccgatagtgatcgcagtgttcttcaaagctgaaaggatagtagaacggcgtgacggcggagacggcatcgaagccataacgtttagcgcttgccgcaagttgttggctttcggcggtgctgacgcaaccgacgtgggcgatgagtttaatcttacctttcgcctcttcggcgacgatttccagtacctgttcacgctcggaaaggctttgtacaaaggcctcgccggtgctaccacccacgtataaaccgtcgatgccctgctgaatattgaactgaaccaggcgacgcagactcgctttatccagtgcttgttgttggtcaaaaggagtcaggagtgcagccattacgccacgtaaattcgttgccataaatacctctgaagtgatgcttgtctgataaacgatatacctttatacctgttataccagatcaattaagcaacaccccatacagaaagcttataatgcgatctgcttcactaaagtggcattatttctttttgttggtggtctgaccgaaagcgtgccaggtagcagagacgctgttgagatggctttgcaacgcacgatcggcttcgtcaggatcatgacggcggatcgcatcaacgatcgcaatatgctgttgataactaacgttgttatgttcgtgcagtgcctgatcggtaaccgttgggcgtgcggcaataagccagtcgagcagggcaacgtggatcgccatgaagattgggttaccggggatctccgccagcacgcggtggaaatcaacgtcactacgaatgaatgccgcgttgttatccaggctctgactgttgatttccagtgcttttgccagcaaatcgatttgctcatcggtggcatgttcagccgcatagcgcaccagactggattcaaagaacagacgtaattgttcgaaatgggcaatcccaccgggatgagaaaggaaatctttcgccatgccggaaagctcaccgatgatagtgtccgcagaaggacggctgacgcgagcgcgttcgccgttgtttatttgcaccagacctttgcgttttaacgctgccagcgcttcacgcacgctaggacgcccgacgttaaagaacgccatcagttcgcgttcagacggtaattgttcaccttcgccaaattcacgacggcggatcatctgttccagctcttcttccaccatttcggagagttttttacgcgccagcgggcggctacgcaagttgcgaccaattgcaggactagaatcttcggtttggctatcaaatgcgttcataaggcccattctgtaaggtcagtgtgattaacatcatcagtgacatcctatcacaggattgaaagtaggggaaaatggcagggttttctctttgtgcctcatcattaccataattaacggaataattaactattgcgaaaaattaatgtaacgcagataaaaacatcccgtttgaattatttataagactattcacgagcattatgaatattatgaatgtgttcttacaaaataatcataagcgcatattttttaatgaaaaatcacctcacctacaattaaaaacacgacatccgcaccataaatagccttgcaaaaaatataacatcgttgttttcaatctgccgtttatgggattgaccgttttcttttgacacggagttcaacaatgttcggcataattatatctgtcatcgtattaattacgatgggctatttgatcctgaaaaactacaaacctcaggtggtgctggctgccgcaggtatcttcctgatgatgtgcggtgtctggttagggttcggtggtgtactcgatcccaccaaaagcagcggctacttgatcgtcgatatttataatgaaatcctgcgcatgctgtccaaccgcattgccggattggggctgagcattatggcggtgggcggttatgcccgctacatggagcgcataggggccagtcgcgcgatggtgagcttgttaagccgcccgttaaaactcattcgcagcccgtatattattctgagcgcaacttacgtcatcggccaaatcatggcgcagtttattaccagcgcctccggtctgggtatgttgctgatggtcaccttatttccgacgctggtgagtctgggagtaagtcgtctctctgcggtggcagttatcgcaaccacgatgtccattgagtgggggattctggaaacgaactccatttttgctgcccaggtagcgggaatgaaaattgccacatacttcttccactaccagcttccggtcgcctcttgcgtcattatcagcgtggcgatctcccactttttcgtgcaacgcgcttttgacaaaaaagataaaaatatcaatcacgaacaggcagagcaaaaagctctcgataatgtcccgccgctctattacgccattttacctgtgatgccgttaatcctgatgctcggcagcctgttcctcgcccacgtcgggctgatgcagagtgaactgcatctggtggtggtgatgttactgagtttgactgtgacgatgtttgttgagttcttccgcaagcataacttgcgcgaaacaatggacgatgtgcaggcgttttttgacggcatgggtacgcagtttgccaacgtggtaacgctggtggtcgcgggtgaaatatttgcgaaaggcttaacgacgattggcactgtcgatgcggttatcaggggggcggagcattctggtctgggcggtattggcgtgatgattattatggcgctggtcattgccatttgtgccattgtgatgggctctggcaatgcgccgtttatgagttttgccagtcttattccgaatatcgcagccggactacatgtaccagcggttgtaatgattatgccgatgcattttgccacgacgctagcgcgcgcggttagcccgattactgcggtggtggtcgttacgagtggaattgcaggcgttagcccttttgcggtggtgaagcggacagcgatccccatggcagtcggtttcgtggtgaatatgattgccacaatcacgctattttattaagtcattaaaaagacaaaacaggccgcctgggcctgttttgtattacttcacaacgcgtaatgccggtcgaccaccgcgtggtggctgcggaggttcatcgtcaggatgagtgtcatcatcgtgatctggcttgtcgccatcaataacgctcataacggtttcgttgtctgcgcttgcctcttcatcattcatgatgctggtatcttcatcgtaggcagcttcaggctcaaacatcgtgcctgcgccattttcacgggcgtagatagccagcacggcagccagcggcacagaaacctgacgcggaatgccaccaaagcgcgcgttaaagcgcacctcatcattcgccagttccagattgccgacagcacgcggcgcaatgttgagtacgatttgcccgtcacgcgcatattccataggaacctgcacgccagggagcgtcacatccaccaccaggtgcggcgtgagctggttatccagcaaccactcatagaatgcacgcagcagatagggacgacgtggtgttagctgactcaaatccatacagattaactccggcccagacgcatttcacgttctgcttcagttaaagaagcaaggaaagagtcacgctcaaagacgcgggtcatatagcctttcagctctttcgcacccgggccgctgaactcgatgcccagttgcggcagacgccacagcagcggagcaagatagcaatcgaccaggctgaactcatcgctcaggaagtacggcttctgaccgaagaccggcgcaatcgccagcagttcttcgcgcagttgcttacgtgcggcatctgcttcagaagcactaccgttgatgatggtgttcatcagcgtgtaccagtctttttcgatgcgatgcatgtacagacggctttcaccgcgagctaccgggtaaacaggcatcagtggcggatgcgggaaacgctcatccagatattccataatgatgcgagattcccacagggtcagctcacgatccaccagggtcggaacgctctgattcgggttgaggtcaatcagatcctgaggcggattgtccttttccacgtgttcgatctcgaaacttacacctttctcagccagcacaatgcggacctgatggctatagatgtcagtaggaccggaaaacagcgtcattacgctacgtttgttggcagcgacagccatgaaaacctccaggtatagtcagaatttttactgctaccagccaccaggtggccagtcagaagttgtgttacccaataaggaacgactctctttgttcgaaaatcaaacaaaaaatgagcaatacccgacatttgggcagaaaattggatgatagtttaccagattttgcgaccattgtggtgagtcgatgccggaaatggggaaaaagagatgcgctttagtctgaaatagttgacttagtcccttattggcgatgtggtttttgttttacctgtctgtcaggtggcagcaaaaagcaactttccagtttttacgctgattcagattttagctataaaaaaacccgccgaagcgggttttttcgaaaattgttttctgccggagcagaagccaattaacgtttggagaactgcggacgacgacgtgctttacgcagaccgactttcttacgttcaacctgacgagcgtcacgagtaacgaagccagctttacgcagttcagaacgcagggactcgtcgtattccatcagagcgcgggtgataccgtgacggatcgcaccagcctgaccagagataccaccacctttaacggtgatgtacaggtccagtttctcaaccatgtcgaccagttccagcggctgacgaactaccatgcgggcagtttcacgaccgaagtactgttccagagaacgttggttgattacgattttaccgttgcccggtttgatgaaaacgcgagctgcggaacttttgcggcgaccagtgccgtagtattgattttcagccattgcctataatcccgattagatgtcaagaacttgcggttgctgtgccgcgtggttgtgctcgttacccgcgtaaactttcagtttacggaacatagcacgacccagcgggccttttggcaacatgcctttaaccgcgatttcaatcacacgctcaggacggcgagcaatcatctcttcaaaggtcgcttgtttgataccaccgatgtggccggtgtggtgatagtacactttgtcagtacgcttgttgccggttacagcaactttgtcagcgttcagaacgatgatgtaatcaccggtatctacgtgcggagtgtattccgctttgtgcttaccgcgcaggcgacgagccagttcagtagccagacggcccagagttttaccggtcgcgtcaacaacataccagtcgcgttttacggtttctggtttagctgtaaaagttttcattaaaagcttacccaataaatagttacacgttggtgaacacccaaacgtcttcaattgttgaggttcacacgacaaagtccggcaaacctaccccttcgaatagcctatgccagcacacaaaaagttttgggaaaaaaactttcttgtaacgtggggtcgcaggattatagagaagtcggggtcaaagatcgacccctttttgtgatttgtgacaggttttaacccgccaaatgctcgcgcttcagatactcttcgctttgcatctcttgcagacgactcaggcaacgctggaactcaaacttcagccgatcgccctgataaatttcatacagcggcacttctgcactcaccactaatttgacatggcgctcgtaaaactcatccaccagcgcaataaagcgccgcgcttcgctctccatcaaccgcgtcataactggtacatcaaacaacatgaccgtatgaaagagacgactgagcgcaatatagtcatgctgactgcgggcgtcgacgcacagcgtagtaaaagagaccgccagcgtctggttctcgacgcccattgttgctaatggccgatggttgatttctaacgtcggactattttctcgtttcccccccgccagcgccaaccatagtttatccatttgcgcccgggtttcatcgtgaagtgggctaagccacagatgcgcctgagtgagtgtacgcagacgataatcaacaccagcgtccacgttcattacatcacaatgctgtttaatggcatcgattgcaggcagaaaacgcgcacgttgcaggccatttcgataaagttcatccggcggaatattactcgtcgctaccagggtaataccgcgagcgaacagggctttcatcagaccgccaagtagcatggcatcggtaatatcagaaacaaaaaattcgtcaaaacagagcacgtcagtttcggctttaaagcgatcggcaataatttccagcggatcggtctgcccctgtaaggcagttagctcttcatgcacccgcagcataaaacggtgaaagtgcaggcgctgtttccgctctcccggcaggctttgatagaaaaggtccatcagccaggttttcccgcgtcctacaccgccccacatatataagccacgcactggcgtatgctttgtgtcttcgcgtttaccccacagcttaccgacccgcgccattagcccactcgtcctgggggctggtggcgtgctattgatgagttcctgataaataatttccaggcggctgacggcctctttttgaacgtcgtcgggttgatggctgccttcattaagcgccttcaggtattggcttgttggggtaacgctttgcatgatcttattgttattccttgaataatcggtgcgccgttgttcacggttgacgaaaaaaaggccgttctacactacgcgatatgcagtcgggattccacttctgtggaattaacggttatagtggcataatcagccgcaggcatggagcctgaagccaacaccctacggaaacaaaagacaacgggagatgttcatgacctgggaatatgcgctaattgggttagtcgtcggcatcattattggtgctgtggccatgcgttttggtaatcgtaaactacgccagcaacaggcgttgcagtacgaactggaaaagaataaagctgaactggacgagtatcgcgaagagctggttagccactttgcccgcagcgcggaattactggataccatggcgcacgactatcgccagctgtatcagcacatggcaaaaagctccagcagcctgctgccggaactgtctgctgaagcaaacccgttccgtaatcgtctggcagagtctgaagccagcaacgatcaggcaccggtgcagatgcctcgcgactattctgaaggcgcatccggcctgctgcgtactggcgcgaagcgcgactaatttatttttcgggcgcagccattgcgccctcctcttctctccctccccgactatcatttaatctggtgtctcattgttagccgtctgaaaattcaataacatcaaactgttttgaatctcttttcttatcattcaggtacgagagcaggaataatgaaaaaacaaacccagctgttgagtgcattagcgttaagtgtcgggttaactctcagcgcgagttttcaggccgtcgcgagcattccaggccaggttgccgatcaggcccctctccccagtctggctccaatgctggaaaaagtgcttccggcagtggtgagcgtacgggtggaaggaacggccagtcagggacagaaaatcccggaagaattcaaaaagttttttggtgatgatttaccggatcaacctgcacaacccttcgaaggtttaggctccggtgtcatcatcaacgccagtaaaggctatgtgctgaccaacaaccatgtgattaatcaggcacagaaaatcagtattcagctcaatgatgggcgcgagtttgatgcaaaactgattggtagcgatgaccagagcgatatcgccctgttacaaattcaaaacccgagcaaattaacgcaaatcgctattgccgactccgataaattgcgcgtcggtgattttgccgtagcggtcggtaacccatttggccttgggcaaaccgccacctctggcattgtttccgcattaggccgcagcgggttgaatcttgaaggtctggaaaactttatccagacagatgcttccattaaccgcggtaactccggcggtgcactattaaaccttaacggtgagttaattggcatcaacactgcaatccttgcgcctggcggcgggagcgtcgggattggatttgccatccccagtaatatggcgcgaacactggcgcagcagcttatcgactttggtgaaatcaaacgcggtttgttaggcatcaaaggcaccgagatgagtgccgatatcgccaaagccttcaaccttgacgtgcagcgtggcgcgtttgtcagcgaagtgttgccaggttctggcagcgcaaaagcgggcgtcaaagcgggcgatattattaccagcctcaacggcaaaccgctgaatagctttgctgagttgcgctctcgtatcgcgaccaccgagccgggcacgaaagtgaagcttggcctgctgcgtaacggcaaaccactggaagtagaagtgacgctcgataccagcacctctagcagcgccagcgctgaaatgatcacgccagcgctggaaggtgcaacgttgagcgatggtcagctaaaagatggcggcaaaggtattaaaatcgatgaagttgtcaaaggaagcccagctgctcaggctggcttgcaaaaagacgatgtgatcattggcgtcaaccgcgatcgggtgaacagcattgctgaaatgcgtaaagtgctggcggcaaaaccggccatcatcgccctgcaaattgtacgcggcaatgaaagcatctatctgctgatgcgttaatgtcgtaaaccgggcatcaggcttacgtgtgatgtccggttaactcgtggtatgctgctgccgttcccttttttaatgacgcctccatcatgtttgtgaagctcttacgttccgttgcgattggattaattgtcggcgctattctgctggttgccatgcctagcctgcgcagccttaacccgctttccactccgcaatttgacagtaccgatgagacgcctgccagctataatctggcggttcgccgcgccgcgccagcggtggttaacgtttacaaccgtggtttgaacaccaactctcacaaccagcttgagatccgcaccctgggatccggtgtaatcatggatcaacgcggttatatcatcaccaataaacacgtcatcaacgacgccgatcagatcatcgtcgccttacaggatggacgtgtatttgaagcattgctggtgggatctgactctctaaccgatctggcggtacttaaaattaatgccactggcggtttacctaccattccaattaatgcacgtcgcgtaccgcacattggcgacgtagtactggcgatcggtaacccgtacaacctcgggcagaccattacccaggggattattagtgccacgggtcgaatcggtctgaacccgaccgggcggcaaaacttcctccaaaccgatgcttccattaaccacggtaactctggcggcgcgctggtgaacagcctgggcgaactgatgggcattaatacgctgagctttgataagagtaacgatggcgaaacgccggaaggtatcggctttgcgattcctttccagttagcaaccaaaattatggataagctgatccgcgatggtcgcgtgatccgcggctacattggtatcggcggacgtgagatcgcaccactgcacgcgcagggcggtggtatagatcaactgcaagggatcgtggttaatgaagtgagtcctgacggcccggcggcgaatgcgggtattcaggtcaacgatctgattattagcgtggataacaaaccggccatctctgctctggagacgatggatcaggtggcggaaattcgccctggtagcgtgatccctgtagtagtgatgcgtgatgataagcagttaacgctgcaggtcaccattcaggaatatccggcaaccaattaagtcgtgcgctcaaaacaaaaaaccggagtctgtgctccggttttttattatccgctaatcaattacttattaacgaactcttcgcccagggcgatatctttcttcagcgtatccagcataccttccagcgcgttctgttcaaatgcgctcagggtaccgatagatttacgctcttccacgccgtttttacccagcagcagcggttgagagaagaaacgggcgtactgaccgtcgccttcaacgtaggcacattcgacaacgccttgttcgccctgcagtgcacgaaccagagacagaccaaaacgtgcagctgcctggcccatagacagggttgcagacccgccaccggccttcgcttcaaccacttcagtacccgcgttctggatgcgtttggtcagatcagccacttcctgctcggtaaaactaacgccaggaacctgactcagcagcggcagaatggtaacaccagagtgaccgccaataaccggcacttcaacttcgcctggctgtttgcctttcagttccgcaacaaaggtgttggaacgaatgatatccagcgtggtaacgccgaacagtttgtttttgtcataaacaccggcttttttcagcacttcagcagcaattgcaactgtggtgttaaccgggttagtgataataccaatgcacgctttcgggcaggttttcgcaacttgctgtaccaggtttttcacgatgccggcgttaacgttaaacaggtcggaacgatccatacccggtttacgcgctacgcctgcagagataagaacgacatctgcgccttccagcgccggagtcgcatcttcaccagaaaaacctttgattttcacagcagtagggatatggctcagatcgacagccacaccgggagtcactggagcgatatcatacagagagagttcactaccactaggcagttgggtttttaacagtagtgcaagcgcctggccaataccgccagcagcgccgaggactgcgactttcatcctaaactccttattatattgataaactaagatatgttgctccgctgccgcgaccttaatccacaaaattgccgtttacaatgaccacatctcaagaatgtgtagtcacgcaagtttagcgtttatgcatttaattgccgtaatcaggaacctaacttacgtaattaacagtcgcttatgcattagcgcaacattccaacaggtggtgacaatataccctaccgttcagccaaaacaacatcaatttgataacaattaatttacttttaagcagaatttgcatgccgtgacgcaggcatgtttctcaataacgaaatttgataaaatcccgctctttcataacattatttcagccttcttcagggctgactgtttgcataaaaattcatctgtatgcacaataatgttgtatcaaccaccatatcgggtgacttatgcgaagcagcgctaagcaagaagaactagttaaagcatttaaagcattacttaaagaagagaaatttagctcccagggcgaaatcgtcgccgcgttgcaggagcaaggctttgacaatattaatcagtctaaagtcagccggatgttgaccaagtttggtgctgtacgtacacgcaatgccaaaatggaaatggtttactgcctgccagctgaactgggtgtaccaaccacctccagtccattgaagaatctggtgctggatatcgactacaacgatgcagttgtcgtgattcataccagccctggcgcggcgcagttaattgctcgcctgctggacagtctgggcaaagcagaaggtattctgggcaccatcgctggcgatgacaccatctttaccacccctgctaacggtttcacagtcaaagacctgtacgaagcgattttagagctgttcgaccaggagctttaatctctgccccgtcgtttctgacggcggggaaaatgttgcttatccctctcaaccccctgctttcccctgcgattaatttaacgaatagtgcgttttactgcgacatgtcattcacacaatgaatacataaggtaaaaaaagcacattatgcaaaattcattatctaattgaaaaaactagaattaacgataaataaccgtatttttaattcttttttgttattaaaattcacatttttaacacttagtatcaactgaaacagttagcgcggtattaattagctcaataattagtgtatacttgattttgtgatatgggtcacgaaacaaaggcccagctaaaagattatgtcgaggtaaaaatcatgaaaatcaaaaccactgttgctgcattaagcgtactttctgttctctctttcggtgcattcgctgccgactccattgatgctgcacaagcacaaaatcgtgaagcaatcgggaccgtatccgtaagtggtgtggcgtctagcccaatggatatgcgtgaaatgctgaacaaaaaagcggaagagaaaggcgcaacggcctaccagattactgaagctcgtagcggtgacacctggcacgctacggctgaactgtacaaataaaccctcatcgtcttgtccgacgatattgcccccggttcgggggcttttttttgcgttaatgacgaacattaaaacgcaaatgcccttccagctcttcctctgcctcatcaaacagcaatattaacgcgccaaaacggcgacgcgttttctctcccagatgaacaaattcaatctcaagtggtagcggcaggacatcgttcattaacacatcccatagactgtcgagatcgcgtaccttatctttcgccagaccaaaggtttggctaaagtcacgataaaaatcctcctgactctcaatctcatcaaaatcaaaggtataaatattcatctgttgccaccgtcacgtttcgcggcgagttctgccgtgcatcgctaagtatagccatgaaaaaaccgacgcttttggcgtcggttttgacttaactatcggtcaacgcatgttgatacttatggagcatccccgccagccgatttaccggttccgtcacctgcggtggcgcttgccagatgcgtagcttttcctggtagatttccagttcttccagcaactggccaaagtaccgacgacgtttatcatcgctacgggcagatatcacatggtctgctgtgcggcgcatttgtcggtgaaacgcgcttaaatcctcgttaaccgggatcggtgcatcacgcaggcgctggtgcgcgataatcatcgtcagcgccaggcgaaatttcggcaaatcccctgggaacttattcatcagcaaaaacagctgctgataaagtgccgggaggtggttctctttacgacgtgccacattggtagtcatcgcggaaacagcggcagaaacaaactgattaagcagtacacgtccggtcctgtcgcggcttttatcccgcaccagcaaaataacggtgaacgcgagcacacagccgacgatttgccctaatgcgctgtcgagaaactgactgaaatggaaagtcatcgggttatccagcacgataatatttatggtgctggccagtgcccccatgctgcccagtcgccgtttctgtacttctataccgaggaagaatcccagcactgccaggctaatgcacagcagcaacatgctctgttgggtattagggataatcaccaaaaagtagagcagccctaacggcagcgcggccagcgtcccgtagataaagtcgatcgccaccatgcgtggattcggcaaacgcattgccagactcgtcactaccgcaatcatcaccattgcaccactgccggaagtccagcccgtccacagccagaaaagcgtgcccagaatgcaggaaagtgtggttcgccagaagttacccattgcatgatgacgttcggcactctctacttttacttccggttcgccttgcaggatctcttcttcggtggcgttgatttttgtgttactgataacgccgcgcttgagaagctgataacgcgttgccgccgcgacccagctataaatggtgacaggcgtttcccgttccccggtccaggcgataactctccgcaggcgtttgagctgcttgtggacgtcctgcgcggtttctaccggcgtgtcaaaaaattcgcggaaagtatcagtgatcaattccgggcgcgtattctgaataagataagtttcgcaggattgggtaatcagcgtcaggcttagcgtattgatcgcttttaaacgtcgattggcccgcgcccagcgggaagattccatattcaggttgctgcgcatgccttgtagcgccgtggtgcgtcgcaccaggtcgccccaggctttatcgacaacttcaccatcgccatgcttgatacagagttgcattaattgatattgcgcgaccagcaaactttccagctctcgatccacttcttgtttgatgcttcgcggagaaaagagcaaatccgccataatcgcacacacaataccgataacgatctcgctacaacgttcgacggcaaactgcggcgtaagcaatggttccggctgaatggtgatcacaatgatcagcgcggtataaccggccagcccccacgcatagctgttttctattcgtaccaggctggatatccaggtacaaaaaccggcccagatacagcacaccagaatcatcaataatggtgcgcggatcatcgcaatgatgatcaccagtccggcaatacagccaataaatgtgccgatgatgcgcaaaaagccacgatagcgaatagcgccagaatacggttcacctcccgcagcaaaggccgtaccggcggcaacaatcgccgctgtcagtaccgcccagcgtggcgtttccagctggaagtgaaagccaacaaacagcgccagtacaatggcggtcgccagttttaccgcaaagcgaatatgttggttagcaatggagaaaatacccatcgtgattaaccaaactcacgcaggcgatgggccattttacggaagaagctatcctggctttcgtcgcgatcttgtttgccagtgaccaccactgtagcagtggtgcccgcaggccagatgttctcttgctggttgtcgagacgaatacgaaccggaacacgttgcgcaagacgcacccattcaaggttagagtctatagtcgccatccctttgtcgtcacgcgtgctgctggcgttggtgacccctgcggcaacactatcaacagtccctttcagcactttgttactgccaagcggcgtgatctctgcacgataccccggacgcaccccttccagcttagtttcttccatataggccagtacatagaaggagttctgtttcaccagcgcaaccgccgtacttcctcgagtaataaactcaccggtatagacgttgaggttggtcacccagccatctgctggcgcgcggatcaccgtgcgttcaagatccagttttgccagatcgcgggtcgcctgcgctttcgctaactgatgcagaaccgtttgtagtacgttgttggcctggtcgatctcttcgcgagacatcgcctgcacaccgagacggttacgacgtccggcctcctggcgtttctcctgtgccagtacctgataataagcaacatcggcttgcgcttcctcaagcgccttttgatagcgcggctggtcgatggtgaacagtatctgtccttttttcaccagctggttatcatgaacattcacctgggtaatgagtccagaaacgtccggcgcgatcgcaacgacgtcagcgctaaagcgcgcgtcacgcgtccagggggattcggtgtaatagacccaggcattaaaaattgcgatgaaggccagaatgactaatacgaccgtgatggccgtacgggagaattttcttattagtgttttcacttcaacctcaaacgaacagtcggcttatcaaataaaacaagcagcaatagagcgcggtgttgaacaacgccggatgccagacaaagtcgtagatacctgttggcacaagtacccggcgcaccagccagaaaatcgccagacttaaaagcaattcaaaaaatatcggtgggaaggacagcccaaacaccacgataacgggaaacagactcatgttgaccttggttgtaaagagagagcaggcgttattattttcagcatctgtcgccgcagagaagggcatggaaagccgggcgagagcaacattgctgtagattgatatttaatatattagcgtaactgttatgctgttatctatattatgtgatctaaatcacttttaagtcagagtgaataatggaacgactaaaacgcatgagcgtgtttgccaaagtagttgaatttggctcttttaccgccgccgccagacagctacagatgagcgttagctccatcagtcagacggtaagtaaactggaagatgagttgcaggtaaagctgttaaaccgtagcacacgcagcattggcctgaccgaagccggtagaatttactaccagggctgccgtcgtatgcttcatgaagtgcaggatgttcatgagcaactgtatgccttcaataacacccccatcgggacgctacgcattggctgttctagtactatggcacaaaatgttctcgccgggctgacagccaaaatgctgaaagaatacccaggtttgagcgtcaatctggttaccggaattccagcccccgacctgattgccgacggtctggatgtggtgatccgcgtcggcgcgttgcaggattccagcctgttttcccgccgtctgggcgcgatgccaatggtggtgtgcgccgcgaaaagctatctcacacaatacggcataccggaaaaacccgccgatttgagtagtcatagttggcttgaatacagcgtgcggcccgacaatgaatttgaactgatcgcaccggaagggatcagcactcgcctgatcccacaaggaagatttgtgactaatgatccgatgacgctggtgcgctggctgacggcgggtgccgggatcgcctacgtgccgctgatgtgggtgatcaacgagatcaatcgtggggagctggagatcctgctgccgcgttaccagagtgatccacgcccggtttatgcgttatataccgaaaaagataagctgccgctgaaggtacaggtcgtgatcaacagcctgacggattattttgttgaggtcggtaaattgtttcaggagatgcacgggcgcgggaaagagaagtaattcatattgtactgttacgttgtacaaacctgtgccaacgggttcccctcaccctaaccctcaccccaaaggggcgaggggaccgttcgtgcacgtagaaagattaattatccttctgaaaatagtgaaattattacgcagtaccgccaacagtcaggttatcgactttcaacgttggctggcccacgccaaccggcaaactttgcccttctttaccgcagacacccacgccgttatccagtttcaggtcgttgccaaccatgctaatctgctgcatggtttcgataccggaaccaatcaacgttgcgcctttcaccggcttcgttactttaccgttttcaatcagatatgcttcactagtggagaaaacgaatttgccggaggtgatatccacctgaccgccaccaaagttcggtgcatagataccgtactcaacggattcaataatttcctgcggggtgcttttacccggcagcatataggtgttggtcatacgcggcatgggcagatgggcgtaggattcacggcgaccgttgccagtcggcgtcatccccatcaaacgcgcgttgagtttatcctgcatgtagcctttcagaatgccgttctcaatcagcacgttgtactggcctggcgtaccttcgtcatcaatcgccacgctacctcggcgatcgaccatcgtgccatcatcaaccacggtacacagttcactagccaccagctccccgacctgtccactaaatacactagtgccacggcggttgaagtcgccttccagaccgtgaccaaccgcttcatgcaacagcacgcccggccaacctgcgccaagtactaccggcatggtgcccgctggtgcagcaacggcagaaagattgaccagcgccatacgcactgcttcttttgcccatgcatccgcacggacttcgccgtcgagatcggcaaggaagaattcataaccaaaacgaccgccgccgccactggcaccgcgttcgcgtttgccatcttcttcgacgagaacgctcacggaaagacgcaccagcggacggacatccgccgctagcgtgccgtcggtggccgcaaccaaaattaattcatagacaccactgaggctggcagtcacttcctgtacgcgcttgtccgcttcgcgggcaaccttatcgacgcgacgcaggatatccagcttctcttcacggctcatgctttgcagcggatctacgctggtatacaacgggctatgctctaccgcgcccagcgtctgtactttaccatcaccactatcacggacgatggtgcgcgccgcttgcgcactctgttccagcgccagcaggctgatttggtcagcgtaagcaaatccggttttttcaccgctgattgcacgcacaccaacgccctgatcgatgttgtaagaaccatctttaataatgcggtcttctaaaacccaggattcgtgatagctgctctgaaaatagagatcgccataatcaaggcgacgttcggccagttgaccgaggatcgcgaacaagtcctgatgtttcaggccgttcgccgctagcaattgttcacttaccaggttaagactcatcgtttttgctactcgttagttactgcagtagaggattttttacggctgccggatgcggcgtgaacgccctatccagcctacggttatgttccggtttgtaggcctgataagacgcacagcgtcgcatcaggcaacggctgtcggatgcggcgtaaacgccttatccgacctacggttatgttccgtttgtaggcctgataagacgcacagcgtcgcatcaggcaacggctgccggatgcggcgtaaacgccttatccgacctacggttatgttccgtttgtaggcctgataagacgcacagcgtcgcatcaggcaacggctgccggatgcggcgtgaacgccctatccgacctacggttatgttctggctcgttggcctttggcaacgattatcctatgagattggggcaattacgcgccctcgtcaaatcattgcgctttttctttacgcggttggcgcaacacttcgttgatttgcggatcgtccagcggaccgctaatgtgatagcgcaaaatggagactttgctccacagcggccccagcactttactggcggcaaacactgccgcgccaacaatggggttaaccgcaaaagccgcagccacgcccaccgtcgcagaaatctctggtgcgacaaccgcttccatattcaggtcgcgacgtaccagatttacgctccctttcatggcgatatccgcctccaggccatccaccagcgtgtcgtcggtgtgcataacgccgtctttaatccacgcggtgctgcgaatggagtcaaaatagaacccttcgccaaaagtgtctctgaaatcaaaacgcagcttacgcatcagggcatctacgctcaataagcgcagcaattgcccggcatgtccggtattgatttcggtaatttcgcctttacccagttgagtatgaatgatgccattcaacgtcgcttcatctggctgccagggtgctttgcgccagtgtaaatcgtaatccacattaaaactgctctggcgtatgggcgtcgtgacaccaaaaaattctgcggcggcatcaattttctgcccgcgcagttttcctttcaggctggtacgttcattccccggattattaacccattcaccatcggcagtaagccggctgaaaccagtatcaatcagtccattggtcagcgttaacgtatcgccagaaatggtgatatcactgtcaatgcgaccgaatttttgcccccagaaccagcactctgtgcatcgtatttgggcgtccggccagccacggaagttaatgcgctccgttgtcgggaaaggactactcggcgtactatcaccacgagttttcgccacgctcgggttgtaataaagatatttgatattcgccagccacggcgcgttattacgcatcgctagcgtggcgttgatttcacgcccttgcgcttcaaccagggtgccatttgccgtcggttggctaacaatactcaggttattccattgctgatttcccagactcaacataggcgtacgtaacgttatgtgttgtgggaaactcgctgcaccaccgacactctccgcagcgcctttctggaacagggccagccactcggcaccattcatcggcggcatattgagttcaacgccactttgttccggcaacggcgggagcgttttactgtctgccgcccaaatagcacgatcgagcgtcagcttttgaccgagcaaccagcggctattgaaatgattatccgcaccagcctgtccggttaattcaaagctgttgagattgccatcaaccttaacgtttaccgctagtggttcacccgcaggtttggctaacggactaggtaagtgactgctcacattctttagatcgccgttcagctctatgttataggtcgcaccagcatgataaggcagatcaatgcccactttaccatcccacgccacgctgccactcaatgcttcgttcaccgcttcaggcagaacgccggttttcgccggttgccagttaccgttgaggtttaccgctacctggtaggcttttgccccttctttggtggaaaaatccacgttcaacggctgattaaaccagcttgctgtcagtggttcactttgcagatcgctattgataaagctgaatttaccgctcaaatttttcagggtgctgtcgagtggtttgataaacagactgttattacgcagcgtcacttcacctttcgcggttaccagttcgccgttcagcgggatatcaagatgtaagcgagcattcacatcgccgtcgagctggagttcttgcagggtcgcacccagagaatctttcagcggtgtctcatcaaagtaagggccaacggctttacccggacctttaatgtcagcgtcaatcagcagtttttctttactgtagtcagggatcactgcggtaagattactcgcgcgcacgccgcccagattaacgccatcggttttcatccataaaccgtcgttaataaagtccagttcaatatcaaggttagttaatgcaggccagtccggctggaaggcaaacttcgcgttgcgcagcggcaccagcacttcaaactgaccttcgttgtgtttataggggaagagttgcggattgccaccataaaccagcgtcgcgttatccgcttcaccgccctgaatcgcgccacttaagtaatcaaccaggtctttacccatcaagttttccgggaaatagcgccaggcttgactaccatcatcggtactgatgccagccagaatacccagccagggttcatcgttagcaggttgcaggtaacgaaaaccgccgcgcgcatggacggctttggctttaacgtcaatattacgcccatccagctggaaacctttgttattgttcagccagcttatagttgcctggccgtcggcgatttctagtggcgcacggaataccgtttcgtaaggcatctttgcctgcttcatgctcgcggtaagcaaaccattttcaacgctgccggaaagcgtcccggagaagtgttccgcacccggtaataatttccattgcttccaggccagatcgctccagcttgcctgaaaacgggtcttgtctgccgcctgaagcgggatatccagcgccagagtgttaatcttgccgctcggttgtgtggagcgccaaacatcacccagtgcaggactaagtttcgcggccagcgggcgtatgccctccaggcctgccagctccagattactggcgcgaatccggagttcgtcactgcgtttattgtctttgccgccaacgtcctgttccggtatccaggccagcgtcaatgctccgctcggccagggtttgccgtccatcgtgatccgtgtatcgggaatagagaactgccagcccggattttcacgcgtaatatgcgcggtcagattatccacgctcagcgtatgcgtttgcttctcgcccaaccagctggcaccgccctgtttcagccagacgtcaccgccggttacatcgcctttgtcgatcgtcatccagccttcaagggagaactgtgccgtttccagcgcaatattgtcctgcatccatttaccgagccacggcttcaggtcgatgtcatccgcctggagccagacgcgaccattgcttaacaacccctcatcatcgcgcaaatccatgcgcacctgcatcacgccgtgctgtccggtaaggctggagaggcttaccaggccttccgcacggtgtcgacgtggatcgttcagccaggtgagttgtgggatcgccagctcggcgcgctgaccggatggcgtcaggaaactgacttcactgtcgcgaagatcgaaatggtcaaattgacgaagaaacagatcgctgatgtgactggcttccagactgtcatcactaccaccgctggtgataggagtgttggtgcgaaagcgcagctgccagaaagtgaggtcgcgaaactgccagcgcatatgtaacaggctctgccagacatccagcgccagagtaacgcgtttaacgctaaattcgccgccatcttttagttctgcacggatgtcgtgtgcttcaagcgtcgggccaaaattctgccagctggcactgagctgactggcttctaccggcatgccagtcgcggattctattttgttgaggatttccggacgccaggcgtcaagatgcggtaaagcaatacgcaggccgctaaccagcagggcagcgatcacaacgagcgcggctccagtaagcagtaaaatccccggcaatcgcctcacccgtcactccttgtctgctaaaaatgtgactcaaaaaccctttgccggatggcggcccagcatctgtttacatcattacgacgtcaaactgctcctggttatagagcggttcaatttgtactttaacctgtttgccaacgaaaatttccacttccgccaggctgtgactctcttcgcctttcaaggcttcagctactgccggagaagcatagaccaggaaacggtcggagtcgtaagcatggtggacacgaacaatctcgcgcatgatttcatagcataccgtttccacggttttcaccgttccgcgaccgtggcaggttgggcattcgttacacagtacgtgctcaatgctttcgcgggtgcgtttacgcgtcatctccaccagccccagcgcgctaaaaccattaacgctggttttcacccggtctttgctcaacgcctgctccaggctgtgcagcactcggcggcggtgatcttcattattcatatcgatgaaatcaataatgataatcccgcccagattacgcaaccgtaactggcgagcgatagcctgcgtcgcttcaatattggtattgaaaatggtgtcgtccagattgcgatgaccgacaaacgctccggtattgatgtccacggtggtcatcgcttcggtctggtcgataatgagataaccaccggatttcagttctactttgcgttccagcgctcgctggatttcgttttcgacatcaaagagatcgaaaatcggctggcgtcctgtgtaatgctccagcttgcttgtcatctcgggaatgtactcgctggtgaactcaagtaacgcttcgtaagtcaggcgactgtcaacgcgaatgcggtccagttcggcatcggcgaaatcacgcagaacacgctgcgccagcgccagttcgccgtacagctgataacgggtctgcgggcgttttttacgctccataactttggtccagacgcgtttcagataagcggcatcggaggccagttcagcctcgccaaccccttccgctgcggtacggatgataaacccgccctgctcgtcgcaatactctgcgaccacttttttcaggcgttcacgttcactttcgctttcaatacgttgggaaaccccaacgtgagaagcccctggcataaacaccagatagcgagaagggagcgtgatatcggtggtcaggcgcgcacctttagtgccaagcggatctttcaccacctgcaccatcagatcttgcccctgacgaaccagttcgctgatgtcgcgcaccgtgaattgcttttgttcttcacccgccacacattcggtgtgcggcatgatgtcggatgcatgaagaaacgcggctttatccagcccaatatctacaaaagccgcctgcatacccggaagtacacgacttacacgacccttgtagatattgcctactattccgcgtcgcgcctcacgttcaatatgaatttcctgcagaataccgccatcaatatacgccactcgcgtttcgctaggcgttacgtttactaacaattcagccgtcatgtttatcccttttctcacgcagtgcgttaaaattacttaataattcatacgtttcaaccagcggtaagccgactacggcgtgatagctgccatttatcttcctgacaaaacagccacccagcccctgaataccgtatgcacctgctttatctaacggttcatcgctggcgacatagcccgcgatgtcttcgtctgttaacgttctgaaagtcacatcggtgaccaccaggcaatcgagaatgtgctggctgtcggccaacgccactgctgtcatcacctgatgggtctgaccgcttaatttgcgcaacatctgcgccgcatgctctgcgtcgcgcggtttctccagcacttctccgttcaggataacgatagtatccgcacccagcaccgggagatccttcgccgtttgcgcgacacctgcccgtgctttctcgcgcgccagacgcacaacatactgctgcgcgctctcctgcggctgacgctgctcctcaatgcccgtaacaatacgttcaaaggtcacgccaagttgcgcaagtaactcctgacgacgcggagaaccggaagctaaatacagagaagtcatagaaacctttattgcactgcaaactgctgacggactttgcgcatcagcaagaaaatccacggccagagcaccccattgactacactactccagaacacttccggtctgaaagagacgttaatcactaaaaactctgcccagaaaacaataatatccaccaccaggctaagcaacatgacgaccagcgcctgctgccataatgcgaggttgcggaaaagctggtatttcagcgccaccaggtaagcaatgatgctcatcgccaatacgcgtacgccaagcgtgctgccgctgatcagatccagtatggcacccatcacaaaacctgtgcccacatttacgcgatgaggcaaggccaggatccaatacaacaagatgagtaacacccagtttggccggaaaacaatcaggttatccggccagggcatgatttgcagcaacagcgcaatgaggaaagagagccagattacccagcgtccctggctacgatagctcgccactattgccctcccggcgcacgttattgccctcccggcgcacgcgcaggcggttgagcaccactttgcggcggcgtagccctttgtggagagcgattagcagcaggctgtgtcggcgcagcaggcgcagtagctgcatttcctgtcgccggttgctgcggagtcggctgagcgatccccgttgccggttcaggtaactttggccccatcgcgtctgggctaggcaatacctgcggcatcatctgcatcagacgttcattagcaacacgatgcacctcttccggcgtcatcgggttagcgccgttacgatctgccccccacagcagcagcagataacgcaaacgttgcagccctgcagtcggacgcgcctgaatcacagtataagcgcgctgggtatcgagttttacggaagagacaaccgcgaccggatagccttccgggaaacgaccgcccagaccggaagtcaccagcacatcaccaacacgaatatccgtattcgccggcagatgctcaagctgcaaatcatccgtacaaccgttaccggctgcaattacgcggatatcgttgcgcagcacctggattggcagcgcgtgggtcgcatcacaaatcagcagcacgcgactggtcagtttagcgacggccaccacctgaccaacaacacctttgtcgctgatgaccggctggccttcataaacgccattaacgctacctttatcgataacaacttgatcgctataaggatcgttaaccgtggagataacctgagtcaccattttctgctcatcctgacgcagcggggaacccagcagctcgcgcagacgcgcgttctcctgtttgtattgtccaagcatcagcagttcactgtttttcagcaacagttcctgacgtaacgcccggttttcaagttctaattggtcacggctggccagcgtctggcttacgccatccagcaattcacgaggagcattggaaacaaagtagaaaggactgacggcggtatccatataagtacggatttgactgaacgtccccaggcggctgtcggcaataataatgccgagcgccaccagcaccgccagaataaggcgaatctgtaggctcgggccacggctaaaaattggcttcataagttatgcgtattctcgtatcagaccaggcagggtaaacagacacttcccctgcctgcatccgattactcttcgctgaacaggtcgccgccgtgcatgtcgatcatttccagcgctttgccgccaccgcgcgccacacaggtcagcgggtcttcagcaacaacgactggaatgccggtttcttccattaacaaacggtcaaggttacgcagcagtgcgccaccaccggtgagcaccatgccgcgctcggagatgtcggaagccagttccggcgggcactgttccagtgcaaccattaccgcgctcacaataccggtcagcggttcctgcagtgcttcgaggatttcattggagttcagggtaaaaccgcgtggaacaccttctgccaggttacggccacgaacttcgatttcacggacttcatcgcccggataagcgctaccgatttcgtgcttgatacgttctgcggtggcttcaccgatcagagaaccgtaattacgacgcacatagttgatgatagcttcgtcgaaacggtcaccaccaatgcgcacagaagaggagtaaaccacaccgttcaaggagataacagcaacttcagtggtaccaccaccgatatcaaccaccatagaaccggtcgcttcagaaaccggcaggccagcaccaattgcggcagccatcggttcttcaatcaggaagacttcacgggcaccagcgccctgcgcggattcacgaattgcgcggcgttcaacctgggtcgcgccaaccggcacacaaaccagaacgcgcgggcttggacgcataaagctgttgctgtgcacttgtttgatgaagtgctggagcattttttcagtcacgaagaagtcggcgataacgccgtctttcattgggcgaatggcagcaatattgcccggcgtacggcccagcatctgcttcgcgtcatgacctactgcagctacgcttttcggactaccggcacgatcctgacgaatggccaccacggaaggctcattcaatacgatgccttgtccttttacataaatgagggtattcgcagtacccaggtcaatggacaagtcattggaaaacatgccacgaaattttttcaacatactaagggataatcctgaaagctggggcggaaaagaaaatccgcttactttaccaaccacacgcagcagcgacaaggcgcaaaaatcatctgctacggtgaaaattagtgcagttcgtttcctttgttacaaatctctgcctgagtccagaaaggcttaatgcatcagcagcattcctcgcctgtttgcaaccgcgtaaggtcattcatctgcatatgtgctgcaacaatctggcgagcagacaagcacactcccatgagacgcagcgcgcattattctacgtgaaaacggattaaacggcaggttaaacgctgtatctttgactatattttttcacgttagtatcaagtggctgactggacgcgaaaaaatccccttgcccgcctgtaacaccgcgctgaatcagggtctgccactcgcttcggctacgcacgccggtggcgtaaacctgggtgctggtcccggagcaggcttccaccaggctttgaaccagcagctggttctccgttcgcttctcaatgtttctgaccagccccggatggagcttgagtaactcaacattaagttctttgatccaactggtacttaccagcgtcaaaccagcctggttgacggctacccgtacccctaaagcattcactaaacgaataacaggttgtaaacgactgatatgttgacctacatcggcctctgcaagttcaataattatgcgttttcgttgacttttttcacattgcattaacgtatcgcgcagccaacgctgaaaacgcgggcgaatcaggctctcaacggtaacctgaatcgccagattttcctctggccagtaacgcaatagtggaataagacggctgatttgcagacggtcatactcttcgcttaagccaaactgcaagaccatcggcatatgctccgcgctgctaacctcttcattaccatcgaagatgcggcacatgagttcgcgatgatgaacctgaccttcgcgagtaaccgccggtttttgataaaggcgcgggccgccgcgactgagcatttgctcgataagcgtacgccagcgaacattaccgcgtcctttttcaggcaagctgtcatcgtaaatagcccagctattgccgccctgcaatcccgcattacgcgtggcagactctgcatgttccattacctgctcggtatcctgaccactacgccaggcgcagataccaatgtggatcatatcgtcgcgatcgagcattttattgttcggcaaggtatcaacggctttgattaactgaccggcgatgctctctgcctcttttaacgtccggtgcggtaacagcgcagcaaaatcactgcggtggtaacgcgccagcagtgcgccagggtagcgcatcataaatgtgctcagcagattcgtcagagtgaagaactgttcttcaacctggctgtgcccccaggtatcgctcaacatattgaaatccggcagacgaatcatcatcacgatcccgtgggtacctactttctcctgatcttccagtaacgttgctaactgattatcgaaaaagagtcggttattgaggccggttttcacgtcctgggcggcataagagcggatcagcgtatcaagacggctgtgttgttcgcgtgcgttctgaatttcacgaagcagcgtatccagcgcactgctggttctgggcggccattcatagatggttcccaacacattagagccacgctcaccgtttaagatacgagtagcccgggtttccagcaattcttgcccggcaagttgccgttgtaaccagcgtaccgccaggaagagcataacaatgataaagccaatcgcccccgtgagcggcgcggtggtcatcaagctatggaaatagttgcccatcggatcctgataaaccagacgcaagctcatccccggatgctttatcaacggaacgctcagttcgcgaaacagatcgctggagccaactggacgataactaccatttctggccagggtataaacctgtttatcaccatggagcaggtctacacgaacgatatctgcgctcatcattaattcggtaatttgtggccttaatacgctgaagtcattgctcacaaggtgggtatcaatcgccgtcgccaccgcctgaacgcgatgactaaacttatactgaatggcgttgtagaaacttaggctacagcccagcaaagtcacaaaaattgttaacccggtgagcagcgtaacaaaggcgctaaatttcgtcgttaatctcatccttgtgttaactccgatagtgaggaagcgggcatactagcaaatcagatttatctcgcaatttattgcgcttcatcggctttgcttttccattagcgagtatagtcttcagaaattattttccaatccatcatgcacatgaggaccacttatgcaggcgttacttttagaacagcaggacggcaaaactctcgcaagtgtacagactctggacgaaagtcgcctgccggagggcgatgtcacggtcgatgttcactggagcagcctgaactataaagatgcgctggcgattaccggtaagggaaaaatcatccgtaattttccgatgattcctgggatcgattttgccggaactgtacgcaccagcgaagatccgcgttttcatgccggtcaggaggtgttactcactggctggggcgttggtgaaaaccactggggtgggctggcggagcaggcgcgagtgaaaggtgactggctggttgccatgccgcaagggctggacgcgcgtaaagcaatgattatcggtactgccggttttaccgccatgctgtgtgtgatggcgctggaagatgccggtgttcgcccgcaggacggggagattgtcgtgacgggtgccagtggtggcgtcggcagtaccgccgtggcgctgctgcataagttgggttatcaggtcgttgccgtttccggtcgcgaaagtacccatgaatatctgaaaagtttaggtgctagccgtgttctccctcgtgatgagtttgccgaatcccgtcctctggaaaaacaagtctgggctggggcaattgacaccgttggcgacaaagtgctggcaaaagtgctggcgcaaatgaattacggcggctgcgtggcggcctgtggtctggcgggtggttttactctgccaaccacggtcatgccatttattctgcgtaatgtccgtttgcaaggggtggatagtgtaatgacgccaccagaacgccgcgcacaagcctggcagcgactggtcgccgatttaccggaaagtttctatacccaggcggcaaaagagatatctctgagtgaggcaccgaactttgccgaggccatcattaataaccagatccagggtcgcacgctggtgaaggttaactaaccatttagcagggaataataagagagggaactcattttgaaatcattattcaatcggttaacgggaaaagcggttagccggacagctttcgtcgaacaccttggtcaggaagttatacaacatcatccaaactggaaagtcatgatttcgactgaccacaaattgatgcgcattgatactccactaaacagctattattgatacgcctccgtcgcctgttaggtttatgttgctttgcctgggcgacgctacgcttagccccttacttatttctggtaccatggggtgaataatctgattttgtttgactacaaattaatcactcgaacctatttaatgctgagcattgtcaatcggttaattttgcgtgctttagcattcacatctatccagacgatgcagtgaaaattgggtaatccccagcaaccgctgcgtaatgtcgtctatcttgtcgcgatcctggcatccctacattatttgtggtctgtgaagattatctcattgcagcccctcatcttcgcagggctggcttttcagcttttcaccttacgttataagaagttccgtcgatgatggcgctaatttcgtgaattgtgcggcttgttgcaaattacacggtgttgaaggttatttacatgttagctgttgattatcttccctgataagaccagtatttagctgccaattgctacgaaatcgttataatgtgcgacctcgtcctccctgacgcagtttttgcgctgcggaaaaggtgacattggcgcaacgaaggtatattttgttttttgccggaggatagcagcagatcgctgcacaatgtccgtcaagtctaacattgacactctggggcaaaatagaccggcgtcccggcctgctggaatttatcgctatgcatacagctgtcggggcatacgctttacagacggcggtgaaacgcctgtcacaatcacactaaacaaagagtacggaacccactcatggatattcgtaagattaaaaaactgatcgagctggttgaagaaagtggcatctccgaactggaaatttctgaaggcgaagagagtgtacgcattagccgtgcagctcctgccgcaagtttccctgtgatgcaacaagcttacgctgcaccaatgatgcagcagccagctcaatctaacgcagccgctccggcgaccgttccttccatggaagcgccagcagcagcggaaatcagtggtcacatcgtacgttccccgatggttggtactttctaccgcaccccaagcccggacgcaaaagcgttcatcgaagtgggtcagaaagtcaacgtgggcgataccctgtgcatcgttgaagccatgaaaatgatgaaccagatcgaagcggacaaatccggtaccgtgaaagcaattctggtcgaaagtggacaaccggtagaatttgacgagccgctggtcgtcatcgagtaacgaggcgaacatgctggataaaattgttattgccaaccgcggcgagattgcattgcgtattcttcgtgcctgtaaagaactgggcatcaagactgtcgctgtgcactccagcgcggatcgcgatctaaaacacgtattactggcagatgaaacggtctgtattggccctgctccgagtgtaaaaagttatctgaacatcccggcaatcatcagcgccgctgaaatcaccggcgcagtagcaatccatccgggttacggcttcctctccgagaacgccaactttgccgagcaggttgaacgctccggctttatcttcattggcccgaaagcagaaaccattcgcctgatgggcgacaaagtatccgcaatcgcggcgatgaaaaaagcgggcgtcccttgcgtaccgggttctgacggcccgctgggcgacgatatggataaaaaccgtgccattgctaaacgcattggttatccggtgattatcaaagcctccggcggcggcggcggtcgcggtatgcgcgtagtgcgcggcgacgctgaactggcacaatccatctccatgacccgtgcggaagcgaaagctgctttcagcaacgatatggtttacatggagaaatacctggaaaatcctcgccacgtcgagattcaggtactggctgacggtcagggcaacgctatctatctggcggaacgtgactgctccatgcaacgccgccaccagaaagtggtcgaagaagcgccagcaccgggcattaccccggaactgcgtcgctacatcggcgaacgttgcgctaaagcgtgtgttgatatcggctatcgcggtgcaggtactttcgagttcctgttcgaaaacggcgagttctatttcatcgaaatgaacacccgtattcaggtagaacacccggttacagaaatgatcaccggcgttgacctgatcaaagaacagctgcgtatcgctgccggtcaaccgctgagcatcaagcaagaagaagttcacgttcgcggccatgcggtggaatgtcgtatcaacgccgaagatccgaacaccttcctgccaagtccgggcaaaatcacccgtttccacgcacctggcggttttggcgtacgttgggagtctcatatctacgcgggctacaccgtaccgccgtactatgacagtatgatcggtaagctgatttgctacggtgaaaaccgtgacgtggcgattgcccgcatgaagaatgcgctgcaggagctgatcatcgacggtatcaaaaccaacgttgatctgcagatccgcatcatgaatgacgagaacttccagcatggtggcactaacatccactatctggagaaaaaactcggtcttcaggaaaaataagactgctaaagcgtcaaaaggccggattttccggccttttttattactggggatcgacaacccccataaggtacaatccccgctttcttcacccatcagggacaaaaaatggacactcgttttgttcaggcccataaagaggcgcgctgggcgctggggctgacccttttgtatctggcagtttggttagtagccgcttacttatctggcgttgcccccggttttaccggctttccgcgctggtttgagatggcctgcatcctgacgccgctgctgtttattggactgtgctgggcgatggtgaaatttatctatcgcgatatcccactggaggatgacgatgcagcttgaagtaattctaccgctggtcgcctatctggtggtggtgttcggtatcagcgtttatgcgatgcgtaaacggagcaccggcaccttccttaatgagtatttcctcggcagccgctctatgggcggtattgtgctggcgatgacgctcaccgcgacctatatcagtgccagtagctttatcggcgggccaggagctgcttataaatacgggctgggctgggtattgctggcgatgattcagcttcctgcagtctggcttagtctcggtattctcggcaagaagtttgcgattcttgcgcgccgctacaatgcagtgacgctgaacgatatgctgtttgcccgctaccagagtcgtcttctggtgtggctggcgagtttgagtttgctggttgcgttcgttggtgcgatgaccgtgcagtttatcggcggtgcgcgcctgctggaaaccgcggcgggtattccttatgaaaccgggctgctgatttttggtatcagcattgcgttatataccgcctttggtggctttcgcgccagcgtgctgaacgacaccatgcaagggcttgtgatgctgattggcaccgttgtgctgcttattggcgtagtacatgccgctggcggcttaagtaacgcagtacagaccttgcaaaccatcgatccgcaactggttacgccacaaggcgctgacgatattctgagccctgcctttatgacgagcttctgggtactggtgtgttttggcgtgattggcctgccgcatactgcggtgcgctgtatctcttataaagacagcaaagccgtacatcgggggatcatcatcggtacgattgtggtcgcaattctgatgttcggtatgcacctggccggagcgttaggtcgggcggtgatccccgatctcaccgtaccggacctggtgatcccaacgttaatggtaaaagtgctgccaccgtttgctgccgggatcttcctggctgcaccgatggctgcgatcatgagcacaattaacgcccaactgctgcaaagttccgctacgatcattaaagatctctatctgaatatccgtccggatcaaatgcaaaacgagacgcgtctgaagcggatgagcgcggtaattacgttagttctcggcgcgttgctgctgcttgccgcctggaagccgccagaaatgatcatctggctgaatttgttggccttcggtgggctggaagccgttttcctgtggccgctggtgctgggtctttactgggaacgcgccaacgccaaaggcgcgctaagtgcgatgatcgttggcggcgtgctgtatgccgtactcgcgacgctgaatattcagtacctgggcttccaccctatcgtgcccagcttactactaagtttgctggctttcctggtcggaaaccgtttcggtacatccgtcccgcaagctaccgttttgactactgataaataaagagttttgccatgccttggatccaactgaaactgaacaccaccggcgcgaacgcggaagatcttagcgatgcgctgatggaagcgggtgccgtttctatcacttttcaggatacccacgatacgccagtatttgaaccgctgccgggcgaaacgcgcctgtggggcgacaccgatgtgattggtctgttcgacgctgaaaccgatatgaacgacgtggtggcgattctggaaaaccatccgctgctcggcgcaggcttcgcgcataaaatcgaacaactagaagataaagactgggagcgcgaatggatggataatttccacccgatgcgctttggtgaacgactgtggatctgccctagctggcgtgatgtgccggacgaaaacgccgtcaacgtgatgttagatccagggctggcgtttggtacgggtacccatccaaccacctctctgtgcctgcaatggctcgacagcctcgatttaaccggtaaaacagtcatcgactttggctgtggttccggcattctggcgatcgcggcgctgaaactgggtgcagcaaaagccattggtattgatatcgatccgcaggcgattcaggccagccgcgataacgccgaacgtaatggcgtttctgaccgtctggaactctacttaccgaaagatcagccagaagaaatgaaagccgacgtggtggtcgctaacatccttgcaggcccattacgtgaactggcaccgttaatcagcgtcctgccggttagtggcggtttgctgggcctttccggtattctggcaagccaggcagagagcgtttgtgaagcttatgccgatagcttcgcactggacccggtcgtggaaaaagaagagtggtgccgtattaccggtcgtaagaattaaccttcgcatcgccgtagggtgacgcggggcgaagtgcgagcaagctcacaaaaggcacgtaaatttgccgattatttacgcaaatttgcgtgccaaaattttcattcataaagaaaaattgagaacttactcaaatttctttgagtgtaaattttagtcactattttctaatatgatgatttttatgagtaattatcgcaccacgctcattttaaatgcaattctttgatccatctcagaggattggtcaaagtttggcctttcatctcgtgcaaaaaatgcgtaatatacgccgccttgcagtcacagtatggtcatttcttaactcatgcgcatcggacaatatcagctcagaaatcgcctgatcgcagcgcccatggctggcattacagacagaccttttcggacgttgtgctacgagatgggagccggattgacagtatccgagatgatgtcttctaacccacaggtttgggaaagcgacaaatctcgtttacggatggtgcacattgatgaacccggtattcgcaccgtgcaaattgctggtagcgatccgaaagaaatggcagatgcagcacgtattaacgtggaaagcggtgcccagattattgatatcaatatgggttgcccggctaaaaaagtgaatcgcaagctcgcaggtagtgccctcttgcagtacccggatgtcgttaaaagcatccttaccgaggtcgtcaatgcagtggacgttcctgttaccctgaagattcgcaccggctgggcaccggaacaccgtaactgcgaagagattgcccaactggctgaagactgtggcattcaggctctgaccattcatggccgtacacgcgcctgtttgttcaatggagaagctgagtacgacagtattcgggcagttaagcagaaagtttccattccggttatcgcgaatggcgacattactgacccgcttaaagccagagctgtgctcgactatacaggggcggatgccctgatgataggccgcgcagctcagggaagaccctggatctttcgggaaatccagcattatctggacactggggagttgctgcccccgctgcctttggcagaggttaagcgcttgctttgcgcgcacgttcgggaactgcatgacttttatggtccggcaaaagggtaccgaattgcacgtaaacacgtttcctggtatctccaggaacacgctccaaatgaccagtttcggcgcacattcaacgccattgaggatgccagcgaacagctggaggcgttggaggcatacttcgaaaattttgcgtaaacagaaataaagagctgacagaactatgttcgaacaacgcgtaaattctgacgtactgaccgtttctaccgttaactctcaggatcaggtaacccaaaaacccctgcgtgacagcgttaaacaggcactgaagaactattttgctcaactgaatggtcaggatgtgaatgacctctatgagctggtactggctgaagtagaacagcccctgttggacatggtgatgcaatacacccgtggtaaccagacccgtgctgcgctgatgatgggcatcaaccgtggtacgctgcgtaaaaaattgaaaaaatacggcatgaactaattcaggttagctaaatgcttgattaaaaaggcgctactcggcatggggaagcgccttttttataggtgtcacaaagggagtgaccatgagaacaggatgtgaaccgacccggtttggtaatgaagctaagaccattattcacggtgatgcgcttgccgaacttaaaaagatccccgccgaaagtgtcgatctgatctttgccgacccaccatataacatcggtaaaaattttgatggtctgatcgaagcctggaaagaagatctgtttatcgactggctgtttgaagtgattgcagagtgccaccgcgttctgaaaaagcagggcagcatgtacatcatgaacagtacggaaaacatgccctttatcgatctccagtgccgcaagctttttaccatcaaaagtcgcatcgtctggagttatgacagttctggagtgcaggcgaaaaaacactacggctccatgtacgaacccatcctgatgatggtgaaagacgcaaagaactacacattcaacggtgatgctattctggtagaagccaaaaccggaagccagcgcgcgttgatcgattatcgcaaaaatcctccacagccttacaatcatcaaaaagtaccgggtaacgtttgggattttccgcgcgtgcgttatttgatggatgaatatgaaaaccacccgacgcaaaaaccggaagccttactgaaacgcattattctcgcctcttccaacccaggcgatatcgttctcgacccgtttgctggtagctttactaccggtgccgtagccatcgccagcggacgaaaattcattggtattgagatcaacagcgagtacatcaaaatggggcttcgacggctggatgtcgcgagccattactctgcggaagaactggcgaaagtgaaaaaaagaaagaccggcaacctgagtaaacgaagccggttaagcgaagttgaccccgatctcattacaaagtaaaggatgtgtaagcctggttttcagattattcatttcgtgtatatttcctgccagacttggttaaacatgcacaggctcaggtaatgattcgcaagtattggtggctcgtcgttttcgctgtcttcgtttttctgtttgatactttactgatgcagtggattgaactgctggcaacagaaacagacaaatgccgcaatatgaacagtgttaatccactaaaactggttaactgtgacgaactgaattttcaggacagaatgtgaatttacatgacacttaattcattcgtttgatgaattaatttcgttatgttttcatctggcatgaacattcttaatacgttatcgaccagagcgggggcttgtttataaagatcataacccgccatattcattaaccagttttgaacaattccgctgaaggcaccatcaataataatcatcacaacatctaaatcgaggttatttgctacacaaccttgttgctgacacgcctgcaatacttcgcggagagtctgcggattaaagcccatcttttcgcgtatcactccctcggccagcatctcatcattaaattcacatttgtgatataagattttcagcaacgcctgctggcggggaattttggcaatatattgcaagccgacaatcaatttttcacgcaattgttgaaacgggtcatgctctaatccagccgtcaagtgttcctggattaactcccgcaaactaggctgttgcaaccacatctcattaaacagttgagtcttgttttcgaagtgccagtagatagcgccacgcgtaacgttagcggcgtcggcaatgtcgttgagcgtcgtcttgcttacgccatgctgcgcaaactgggcgatggcagtttcaatcagttcttgccgggtcttcagagcttcggctttggttctttttgccatgattaattattcaggaaataaatatattcgacacagagtgagaaaatagcgaaggttaatctatcacctaatgtgtatttatacgagaggctaatattgagttgctataaatcgttaaataaataatatatattatttacctaagatacattcactacatcaatatatatttcaatttacgaggttttaattctgcctctttcaacccgcgtcaaaataaaacagtagaatattaatctttttttgtgtttatgtgccttgagatgcctgtattcataactattccttacatcgacgaatgataatttgtaggatagcgaactgtatttttctttctgcgagttaacgcgttgcctttttgggtaaataacgcgcttttggttttttgaggaatagtaatgacgaaacatgccaggtttttcctcctgccctcctttattctgatctccgcggctttaatcgccggttgtaacgataagggagaagagaaagctcacgtcggtgaaccgcaggttaccgttcatattgtaaaaacggccccgttagaagttaagactgaattaccaggccgcaccaatgcttatcgtatagccgaagttcgcccacaggttagcgggatcgtactgaatcgcaatttcactgaaggcagcgatgtgcaagcaggccagtccctgtaccagatcgatcccgcgacctatcaggcaaattatgacagcgcgaaaggcgaactggcgaaaagtgaagccgccgccgccatcgcgcatttgacggtaaaacgttacgttccgctcgtgggtacgaaatacatcagccagcaggagtacgaccaggccattgctgatgctcgtcaggccgatgccgccgtgattgccgcaaaagccacagtcgaaagcgctcgcatcaatcttgcttataccaaagtcactgcgccaattagcggacgtatcggcaaaagcactgtgaccgaaggcgctcttgtcactaatgggcaaacgactgaactggcgactgtccagcagctcgatcctatctacgttgatgtgacccaatccagcaacgattttatgaggctgaagcaatccgtagagcaaggaaatttgcataaggaaaacgccaccagcaacgtagagttggtcatggaaaacggtcaaacctatcccctgaaaggtacgctgcaattctccgatgtgaccgttgatgaaagcaccggctccataaccctacgtgctgtcttccctaacccgcaacatacgcttttgccgggtatgtttgtgcgtgcacggattgatgaaggcgtccaacctgacgccattcttatcccgcaacaaggcgttagccgcacaccgcgtggtgatgcaaccgtgctgattgttaacgataaaagtcaggttgaagcgcgccctgtcgttgccagtcaggcgattggcgataaatggttgattagtgaaggactgaaatctggcgatcaagtcattgtcagcggcctgcaaaaagcgcgtccgggagagcaggttaaagccactaccgatacccccgcagatactgcaagcaagtaaggtaatctgacatggcaaacttttttattcgacgaccgatatttgcatgggtgctggccattattctgatgatggcgggcgcactggcgatcctacaattgcccgtcgctcagtatccaacaattgcaccgcctgcggtttctgttagtgcaaactatccgggcgctgatgcgcagaccgtgcaggatacggtgacgcaggttatcgaacagaatatgaacggtatcgataacctgatgtatatgtcctccaccagcgattccgccggtagcgtgacaattacccttaccttccagtccgggaccgatcctgatatcgcgcaagtgcaggtgcagaacaaactccagctcgccacgccgttgctgccgcaggaggttcagcagcaggggatcagtgttgaaaagtccagtagcagctatttgatggtggcgggctttgtctctgataacccaggcaccacacaggacgatatcagcgactatgtggcctctaacgttaaagatacgcttagccgtctgaatggcgtcggtgacgtacagcttttcggcgcacagtatgcgatgcgtatctggctggatgccgatctgctaaacaaatataaactgacaccggttgatgtgattaaccagttgaaggtacagaacgatcagatcgctgccggacagttgggcggaacgccagcgttaccagggcaacaattgaacgccagcattattgctcagacgcggtttaaaaatccggaagaattcggcaaagtgaccctgcgcgtaaacagtgacggcagcgtggtacgcctgaaagatgtcgcacgggttgaacttggcggtgaaaactataacgttatcgctcgtatcaacggaaaaccggcggcgggcctggggattaagctggcaaccggcgcgaatgctctcgataccgcgaaagccattaaggcaaaactggcggaattacagccattcttcccgcagggaatgaaggttctctacccttatgacaccacgccattcgtccagctttctattcacgaagtggtaaaaacgctgttcgaagccattatgctggtgttcctggtgatgtatctgttcttgcagaatatgcgagcaacgctgatccccgccattgcggtacccgtggtgttgttagggacgtttgccatcctcgccgcttttggttactccatcaacacactaacgatgttcgggatggtgcttgccatcgggctgctcgtcgatgatgcgatagtggtggtggagaacgtcgagcgcgtgatgatggaggataagctcccgccaaaagaagcgacggaaaaaagcatgagccaaattcagggcgcactggtgggtatcgcgatggtgctgagtgcggtatttattccgatggcattcttcggcggttctactggggcaatttatcgccagttctctatcaccatcgttagcgcaatggcgctttctgttctggtggcattgattcttacccctgcgttatgtgcaacgctgcttaaacccgtctctgctgagcatcacgaaaataagggcggtttcttcggttggtttaataccaccttcgatcatagcgttaaccactacaccaacagcgtcggcaaaatcctcggatccacaggacgatatttactgatctatgcgctgattgttgcaggaatggtggtgttgtttttacgtcttccgtcttccttcttacctgaagaggatcagggtgtctttctgaccatgattcagttacccgctggcgcgacgcaagagcggacgcaaaaagtgttggatcaagttacggattactatctgaagaacgagaaagcgaacgttgaaagtgtctttacggttaacggctttagcttcagcggccaggcacaaaacgccggtatggccttcgtcagtctgaaaccgtgggaagagcgtaatggtgacgaaaacagtgcggaagcggtaatccatcgtgccaaaatggaattgggcaagatccgcgacggttttgtcattccattcaatatgccagccattgttgaactgggcacggcaacgggtttcgactttgagttaattgatcaggctgggctgggtcacgatgccctaacccaggcccgtaaccagttgcttggtatggcggcgcaacatcctgccagcttagtcagcgtgcgccctaatggcctggaagacaccgcgcagtttaaactggaagttgaccaggaaaaggcgcaggcattaggtgttagtctttctgacatcaatcagaccattagtacggcgctgggtgggacttacgttaacgacttcatcgaccgtggccgcgtgaaaaagttgtatgttcaggcggatgccaaattccgtatgctgccagaagatgtcgataaactttatgtccgcagcgccaacggcgaaatggtgccattcagcgcctttaccactagtcattgggtgtatggctctccgcgactggaacgctacaacggtctgccgagtatggagattcagggggaagccgcgccaggaaccagttccggcgatgccatggcgttgatggaaaaccttgcgagtaaattacctgcgggcattggttatgactggacgggtatgagctatcaggaacgcttaagcggaaaccaggctcccgctctggtagcaatttcctttgtggttgttttcctgtgccttgctgcactctatgaaagctggagtattcctgtcagcgttatgttggtagtgccgttagggattgtcggcgtgctgctggcggcgacactctttaatcaaaaaaatgacgtctactttatggtgggcttgctaacgacaattggcttgagcgccaaaaacgctattttgatcgttgagttcgctaaagatctcatggagaaagagggtaaaggtgttgttgaagcgacactgatggcagtacgtatgcgtctgcgtcctatcctgatgacctctctcgcctttattctcggcgtattaccgctagctatcagtaacggtgccggcagtggcgcgcagaacgctgtgggtatcggggtaatgggaggaatggtctctgcaacgttgctggcaatcttcttcgtaccggtgttctttgtggtgatccgccgttgctttaaaggataaatcagaaacataaaggcgctttcgggtgcctttattatttccagtgaaacccataaaaattaataagatattcttctgctcactctttaaaagctttctatagttcccgctcccttcactatttttacaattcacataatttgtcattattcattccgcaagatttataacctccggtgataaaatggcattcagctcgttaataagagagttaacttattaagcgttagcgtttattactgaggtaacaccatgaaaagattaattcctgtggcattgctcaccgcattgctggcgggctgtgctcacgatagcccctgcgttccggtttatgacgatcagggtcgtctggttcacaccaatacctgtatgaaaggcacgactcaggataactgggaaacggctggggctattgccggcggggcagctgctgttgctggcctgacgatggggatcatcgctctaagcaaataactgaacagggcgcggagttccgcgctctttttaacgatacagtatctctccataagataaaatattgctatattctgctgggtaattccctgctgatttagcatgttacatcgcgttatttcgctgctttcgaaataacgcatcaatttaattttcacacttcccaccagaaatatactcacgctaacaatcattattctgcttagtaaaacacgcgtaaatattttgcgccaaaatgtggcgcatgtttcattttcgcaccattgcggggcgctgtttttattatttcctgtctacactcagcttattgcgacgcgaaatcgtgcgcaaaagctggcactacttttgcttataagaggatggccacagacaggtaaaagacgtttcccaaacgtcctataacgataattttcgcctcacaggaagcattatgaaaaagatgatgatagccacactggctgccgccagcgtgctgcttgccgttgcaaatcaggcgctgctggcgcgacgcttgatgccgttcagaaaaaaggttttgtgcaatgcgggatcagtgatggattacctgggttctcttatgccgatgctgacggtaagtttagtggtattgatgttgatatttgtcgtggtgttgccgctgctgtatttggtgacgacacgaaagtgaaatataccccgctcactgcaaaagaacgcttcaccgctttacagagtggggaggtggatttgctctcccgtaatacgacctggactagttctcgcgatgccgggatgggaatggcatttaccggcgtcacttattacgacggcattggcttcctgacgcacgataaagcggggctaaaaagcgcgaaagaactggatggcgctaccgtctgtattcaggcgggtactgataccgaactcaacgtcgccgactacttcaaggcaaacaatatgaagtacacaccggtgactttcgatcgctctgacgaaagtgcgaaggcactggaatctggtcgctgcgatacgctggccagcgatcaaagtcaactgtatgccctgcgcatcaaattaagcaacccagctgaatggattgtcttaccggaagttatcagtaaagaaccgcttggtccggtagttcgtcgtggcgatgatgaatggttcagcattgtacgctggacgcttttcgccatgctgaatgctgaagagatgggcatcaattcccagaacgtcgatgaaaaagcggctaatccagcaacgcctgatatggcacatctgctgggtaaagaaggcgattacggcaaggatctgaagctggataataaatgggcctataacatcatcaaacaggtgggtaactacagcgaaatttttgagcgtaacgtaggtagtgaaagcccgctgaaaattaaacgtgggcaaaataatctctggaataacggcggtattcagtacgcaccgcccgtgcgttaagtcggtgtgaggtaacgagcgtcgctacggcggcgctctcttcagcgttatgctttccgaggtttctatgtctcatcgccgcagtaccgttaaaggcagtctctcttttgccaaccctacggttcgcgcctggttattccagatccttgccgttgttgctgttgtcggcattgttggttggttatttcacaacactgtaacgaatctcaataatcgtggcattactagtggttttgcctttctggatcgcggcgctggcttcggtattgtccagcatttgatcgattaccagcagggcgacacctacggacgcgtttttattgtcggcttactcaatacgctactggtttctgcattgtgtattgtgttcgcttctgttttgggcttctttatcggtctggcgagacttagcgataactggctgctacgaaagctttccacaatttatattgagatcttccgtaatattcccccgctgctgcaaatcttcttctggtactttgccgtgttgcgcaatttgcccggaccacgccaggctgtgagcgcgtttgatctggcctttttgagcaatcgtgggctttatattccgagtccgcagctgggagacggatttattgcgtttatcctggctgttgttatggctatagtcctttctgttgggctattccgctttaataaaacataccagataaagaccggacaactgcgccgcacctggccgatcgccgcagtgttgatcattggtttgcctttactggcgcaatggctttttggcgcagcactacactgggatgtcccagccctacgaggctttaacttccgcggcgggatggttttaattcctgaactggcagccttaacgctggcacttagcgtttatacatctgcatttatcgccgagattatccgcgctgggatccaggcagtgccttatggtcaacatgaagcggctcggagtctgggattacccaacccggttacgctacgccaggtcattattccccaggcattgcgggtgattattccaccgttaaccagccagtatctcaacatcgtcaaaaactcctctcttgccgccgctattggctatcccgatatggttagcctgtttgccggcaccgtgctgaatcagacggggcaagccatcgagacgatagccatgaccatgagcgtctatctgattatcagcctgactatcagcctgctgatgaatatctataaccgccgcatcgcgatcgttgaacgctaaggagtcatgatgacaaaagtattgctgtctcatcccccgcgcccggcgagccataacagtagccgcgcgatggtgtgggtgcgaaaaaatctgttctccagctggagcaatagcctgctgactattggctgcatatggttgatgtgggaactgatcccaccgttgctgaactgggcatttttgcaggctaactgggttggcagtacgcgtgccgactgcacaaaagccggtgcctgttgggtcttcatccacgaacgatttggtcagtttatgtatgggctttacccacacgaccaacgctggcgaattaacctcgcattactgattgggcttgtgagcatcgcaccaatgttctggaaaatactcccgcatcgcggtcgctatattgcggcctgggcggtgatttacccactgattgtctggtggctgatgtatggcggtttttttgctcttgagcgggttgaaacccggcaatggggcgggctgacgctaactttaattattgcaagtgttgggattgcgggggcgctaccgtgggggatcttactggcgttaggtcgccgctcccatatgccgattgtgcgtatcttaagcgtcatttttatcgaattctggcgcggcgtgccgctgattaccgttctgtttatgtctagcgtcatgctgccgttgtttatggcagaaggcaccagtatcgacaaattgatccgcgcgctggttggcgtgatcctgtttcagagtgcatatgttgcggaagtcgtgcgaggtggattacaggcgctgcctaaagggcaatatgaagcggcagagagcctggcgttgggttactggaaaactcaggggctggttattctgccacaggcgttgaagctggtaattcctgggctggtaaataccatcatcgcactcttcaaagataccagcctggtgatcattatcgggttgttcgatcttttcagtagcgttcagcaggcaaccgttgatcccgcctggttgggtatgagcacggaagggtatgttttcgccgcgctgatctactggatcttctgtttcagcatgagccgctatagccagtatctggaaaaacgttttaacaccgggcgtacaccgcattgaggacactatgagccaaattttactgcaacctgctaacgcgatgattacgctggaaaacgtcaataaatggtatggacaattccatgttttgaaaaatataaatttaaccgtgcaaccgggagaacggatcgttctgtgtggccctagtggttccggtaaaagcacaaccattcgttgtattaatcatctggaagaacatcaacagggacggatcgtggtagatggcatcgaacttaatgaagatatccgcaatattgagcgcgtcaggcaggaagtgggaatggtctttcagcatttcaatctcttccctcatctgaccgttttacagaactgtaccctggcaccgatttgggtacgcaagatgcctaagaaagaggctgaagatctggcggtgcattacctagagcgggtgagaattgccgaacatgcgcataagtttcccggacagattagtggtggtcagcagcaacgcgttgccattgcgcgtagcctgtgtatgaagccgaaaattatgttgtttgatgagccaacgagcgcgctcgatcctgagatggtgaaagaggtgctggatacgatgattgggctggcgcagagcggtatgacaatgttgtgtgtaacacatgagatggggtttgcacgaaccgtcgctgaccgggtaatttttatggatcgtggggaaatagtggagcaagctgcacctgatgaattttttgcgcatcctaaaagtgagcgtacgagggcatttttaagccaggtaatccattaattgaatgttagttcgaaaagcaaaaaggccatcctttcggatggcctttcgcttgatttgatgtctggcagtttatggcgggcgtcctgcccgccaccctccgggccgttgcttcgcaacgttcaaatccgctcccggcggatttgtcctactcgggagagtgttcaccgacaaacaacagataaaacaaaaggcccagtcttccgactgagccttttgttttatttgatgtctggcagttccctactctcgcatggggagaccccacactaccatcggcgctacggcgtttcacttctgagttcggcatggggtcaggtgggaccaccgcgctactgccgccagacaaattcttttctaatctgccgaactttaacctaaaaagtggtgctgatacccagagtcgaactggggacctcacccttaccaagggtgcgctctaccaactgagccatatcagcacgctaaatttgatgcctggcagttccctactctcgcatggggagaccccacactaccatcggcgctacggcgtttcacttctgagttcggcatggggtcaggtgggaccaccgcgctacggccgccaggcaaattctgttttatcagaccgcttctgcgttctgatttaatctgtatcaggctgaaaatcttctctcatccgccaaaacagcttcggcgttgtaaggttaagcctcacggttcattagtaccggttagctcaacgcatcgctgcgcttacacacccggcctatcaacgtcgtcgtcttcaacgttccttcaggacccttaaagggtcagggagaactcatctcggggcaagtttcgtgcttagatgctttcagcacttatctcttccgcatttagctaccgggcagtgccattggcatgacaacccgaacaccagtgatgcgtccactccggtcctctcgtactaggagcagcccccctcagttctccagcgcccacggcagatagggaccgaactgtctcacgacgttctaaacccagctcgcgtaccactttaaatggcgaacagccatacccttgggacctacttcagccccaggatgtgatgagccgacatcgaggtgccaaacaccgccgtcgatatgaactcttgggcggtatcagcctgttatccccggagtaccttttatccgttgagcgatggcccttccattcagaaccaccggatcactatgacctgctttcgcacctgctcgcgccgtcacgctcgcagtcaagctggcttatgccattgcactaacctcctgatgtccgaccaggattagccaaccttcgtgctcctccgttactctttaggaggagaccgccccagtcaaactacccaccagacactgtccgcaacccggattacgggtcaacgttagaacatcaaacattaaagggtggtatttcaaggtcggctccatgcagactggcgtccacacttcaaagcctcccacctatcctacacatcaaggctcaatgttcagtgtcaagctatagtaaaggttcacggggtctttccgtcttgccgcgggtacactgcatcttcacagcgagttcaatttcactgagtctcgggtggagacagcctggccatcattacgccattcgtgcaggtcggaacttacccgacaaggaatttcgctaccttaggaccgttatagttacggccgccgtttaccggggcttcgatcaagagcttcgcttgcgctaaccccatcaattaaccttccggcaccgggcaggcgtcacaccgtatacgtccactttcgtgtttgcacagtgctgtgtttttaataaacagttgcagccagctggtatcttcgactgatttcagctccacgagcaagtcgcttcacctacatatcagcgtgccttctcccgaagttacggcaccattttgcctagttccttcacccgagttctctcaagcgccttggtattctctacctgaccacctgtgtcggtttggggtacgatttgatgttacctgatgcttagaggcttttcctggaagcagggcatttgttgcttcagcaccgtagtgcctcgtcatcacgcctcagccttgattttccggatttgcctggaaaaccagcctacacgcttaaaccgggacaaccgtcgcccggccaacatagccttctccgtccccccttcgcagtaacaccaagtacaggaatattaacctgtttcccatcgactacgcctttcggcctcgccttaggggtcgactcaccctgccccgattaacgttggacaggaacccttggtcttccggcgagcgggcttttcacccgctttatcgttacttatgtcagcattcgcacttctgatacctccagcatgcctcacagcacaccttcgcaggcttacagaacgctcccctacccaacaacgcataagcgtcgctgccgcagcttcggtgcatggtttagccccgttacatcttccgcgcaggccgactcgaccagtgagctattacgctttctttaaatgatggctgcttctaagccaacatcctggctgtctgggccttcccacatcgtttcccacttaaccatgactttgggaccttagctggcggtctgggttgtttccctcttcacgacggacgttagcacccgccgtgtgtctcccgtgataacattctccggtattcgcagtttgcatcgggttggtaagtcgggatgacccccttgccgaaacagtgctctacccccggagatgaattcacgaggcgctacctaaatagctttcggggagaaccagctatctcccggtttgattggcctttcacccccagccacaagtcatccgctaatttttcaacattagtcggttcggtcctccagttagtgttacccaaccttcaacctgcccatggctagatcaccgggtttcgggtctataccctgcaacttaacgcccagttaagactcggtttcccttcggctcccctattcggttaaccttgctacagaatataagtcgctgacccattatacaaaaggtacgcagtcacacgcctaagcgtgctcccactgcttgtacgtacacggtttcaggttctttttcactcccctcgccggggttcttttcgcctttccctcacggtactggttcactatcggtcagtcaggagtatttagccttggaggatggtccccccatattcagacaggataccacgtgtcccgccctactcatcgagctcacagcatgtgcatttttgtgtacggggctgtcaccctgtatcgcgcgcctttccagacgcttccactaacacacacactgattcaggctctgggctgctccccgttcgctcgccgctactgggggaatctcggttgatttcttttcctcggggtacttagatgtttcagttcccccggttcgcctcattaacctatggattcagttaatgatagtgtgtcgaaacacactgggtttccccattcggaaatcgccggttataacggttcatatcaccttaccgacgcttatcgcagattagcacgtccttcatcgcctctgactgccagggcatccaccgtgtacgcttagtcgcttaacctcacaacccgaagatgtttcacttcagagttgcgaaaatttgagagactcacgaacaactttcgttgttcagtgtttcaattttcagcttgatccagatttttaaagagcaaaacttcgcagtgaacctttgcaggtacactctgaagtattttttatttaatcactacagagatggtggagctatgcgggatcgaaccgcagacctcctgcgtgcaaagcaggcgctctcccagctgagctatagccccataacatgtagttaaaacctcttcaaatttgccgtgcaaatttggtaggcctgagtggacttgaaccaccgacctcacccttatcaggggtgcgctctaaccacctgagctacaagcctgtagaggttttactgctcattttcatcagacaatctgtgtgagcactgcaaagtacgcttctttaaggtaaggaggtgatccaaccgcaggttcccctacggttaccttgttacgacttcaccccagtcatgaatcacaaagtggtaagcgccctcccgaaggttaagctacctacttcttttgcaacccactcccatggtgtgacgggcggtgtgtacaaggcccgggaacgtattcaccgtggcattctgatccacgattactagcgattccgacttcatggagtcgagttgcagactccaatccggactacgacgcactttatgaggtccgcttgctctcgcgaggtcgcttctctttgtatgcgccattgtagcacgtgtgtagccctggtcgtaagggccatgatgacttgacgtcatccccaccttcctccagtttatcactggcagtctcctttgagttcccggccggaccgctggcaacaaaggataagggttgcgctcgttgcgggacttaacccaacatttcacaacacgagctgacgacagccatgcagcacctgtctcacggttcccgaaggcacattctcatctctgaaaacttccgtggatgtcaagaccaggtaaggttcttcgcgttgcatcgaattaaaccacatgctccaccgcttgtgcgggcccccgtcaattcatttgagttttaaccttgcggccgtactccccaggcggtcgacttaacgcgttagctccggaagccacgcctcaagggcacaacctccaagtcgacatcgtttacggcgtggactaccagggtatctaatcctgtttgctccccacgctttcgcacctgagcgtcagtcttcgtccagggggccgccttcgccaccggtattcctccagatctctacgcatttcaccgctacacctggaattctacccccctctacgagactcaagcttgccagtatcagatgcagttcccaggttgagcccggggatttcacatctgacttaacaaaccgcctgcgtgcgctttacgcccagtaattccgattaacgcttgcaccctccgtattaccgcggctgctggcacggagttagccggtgcttcttctgcgggtaacgtcaatgagcaaaggtattaactttactcccttcctccccgctgaaagtactttacaacccgaaggccttcttcatacacgcggcatggctgcatcaggcttgcgcccattgtgcaatattccccactgctgcctcccgtaggagtctggaccgtgtctcagttccagtgtggctggtcatcctctcagaccagctagggatcgtcgccttggtgagccgttaccccaccaacaagctaatcccatctgggcacatccgatggcaagaggcccgagggtccccctctttggtcttgcgacgttatgcggtattagctaccgtttccagtagttatccccctccatcaggcagtttcccagacattactcacccgtccgccactcgtcagcgaaacagcaagctgtttcctgttaccgttcgacttgcatgtgttaggcctgccgccagcgttcaatctgagccatgatcaaactcttcaatttaaaagtttgatgctcaaagaattaaacttcgtaatgaattacgtgttcactcttgagacttggtattcatttttcgtcttgcgacgttaagaatccgtatcttcgagtgcccacacagattgtctgataaattgttaaagagcagttgcgacgcggctttcagctcactgtcgcgaggtggcgtatattacgctttcctctttcagagtcaaccctgaatttcaggatttttttctcttcgttgttccgaccatcctgtgaagtgtttcacgttgtcgtctcaacggaggcgcattatagggatcccaattttttgcacaagtatttttttgatctttttttctgtttgttgttttttcaccctttttgctgcaatcgcacacaaaacggtgcttttttgcatactaaaagacttgcacaaggccaataatgcccccaaagtcattagtaaatcatttattgctgaggtaagtatgtctgatgttttacgcccataccgcgatctttttccacaaatcggtcagcgcgtaatgatcgacgatagcagtgtcgtgattggtgacgttcgtctggctgatgatgtggggatctggccgctcgttgtgattcgtggagatgtacattatgtacagatcggagcacgcaccaatatccaggatggcagtatgttgcatgtcactcataaatccagctacaacccagatggcaacccattaaccattggcgaagatgtcactgttggtcacaaggtgatgctccacggctgcaccattggcaatcgagttttggttgggatgggcagtattttacttgatggcgcaatagtagaagatgatgtgatgattggtgcgggtagtctggtcccacaaaataaacggctggagagcggatatctgtatctcggtagccccgtcaaacagatccgcccgttaagtgatgaagagaaggctgggttacgctattccgcgaataattacgtgaaatggaaggacgaatatctggatcagggtaaccagacccagccttgatcatcttcactttgttcctgaattaagttttccgcttcttcttccaggtcccagcgatgctgacgaaaactcgctaaccactgttctggcgtatctccagtaaagcgatacgccagactctcgccagagatcgcgcatgtcagttgcataccattcacgagagcgggaaaacatacacattttttattctcgtcccactcttccctgtccggaaactggatggcctgattcacgcggacaattcctcctgcaattgctttataactggttctacgtcaggcagaacaccgtgccagagaagaaaggcatgagccgcctgtgccaccagcattcctaaaccatcagcattacgcttactgcctcgctgctcacaccatgccagaaaaggagtttttcctttctgatagaacatgtcatagcaataaatgcctggatgaatgaggctactcgggatcgccggaatatcaccactgatgccactggatgttgcattaataatgagatcaaactcatgaccttccagttcgtccatactcaacgcctgaatactgccagtgtgcgcaaacaatttagccaactcttccgcgcgggataccgtccgattagttattgtcaccgcacagtccagggaaaggagtggcagtagtacgccgcgagatgctccaccagcgccgataagcagaatacgtaaaccagggcggataaaagacagacgttccagatcgcttaacaagcctacaccatcggtattgtcacccagcaggcgtccatcttctaaccgcatgagggtattaacagcaccagccaacgctgcccgttcagtaagctcatccgctctggcaaaagcctcttctttaaaaggcaccgtcacattcgcacctttaccaccagcactaaagaaagcgttcagtgtgttgatgaaatcattgatgggtgccaacacgcgcccatagggatgttcaatattcagttgctgagcaaattgctgatgaatgaatgggcttttgctgtgggctatcggattaccaaaaacagcataggtttccattatgttacccctgtcgaaacagttcacccgtcagggcatcgcggatttcactaggatttaaacgcccccccgtttcaccaggcacaaccgggaacgccgcgccaaattgtgcgcgaacttcgtctactgttcgacaaggtggcaatccactcaagttggcactggtagaaaccagcggtttaccataagcctggcacaaagcaaccaccaacggatggtcggtgactcgtacagcaaggctatcaaagcggcccgtcaaccagcgcggtgttgtcgcaggcgcgggaaagacaaaggtgacaggacctggccagcgggaaaaaatggtttcacgctgcacgtcagtcaacatggtgtcatcaatatagggtttaagctgctcgtaatttgctgcgattaaaatcagccccttatcaaccggacgctgttttaactccaacagtcgcatcactgctgtttcgctatcaggatcgcacccaacaccgaaaacggcttccgttggataggcgatgacacgttcttcattgagaacatctatcgcagctgcgatagcgtctctttgcaggttattattcacgttattattccgcgctaaccggctttccacattgtttactggcacaaaagtgttttacaccctgcgcggttttcttttcgatgagtagcggataatgacactcagggcattctccagctatgggtttgaagttaatggcaaattgacactccgggtagcgatcacaagagtgaaatgttttgccataacgggagcggcgctggaccagatggcccgtccgacattgggggcatgtaattgctgtttcgtccggtttatcgataagttcggtatgttcgcattcagggtagttaatgcaaccaataaacataccaaagcgtccctggcgtaataccagatttgcgccacatgcagggcaaacctgcccctccagaactttgacgatatgtccatccgcactagatttcagaggacggacgtagtcacacgccggatactgactgcatccaagaaacggaccgtgtttcccggatcgaataaccagttcagccccgcactttgggcaggactcattattacgcaccgtgaacagtgcacttttcgccataacaacttatgctgaattaaagaaatgattaatgcagcataccttcattcacttcaaagagtaattcttccatttgctggtacgcattttcgcagcccggaatattgaacaacaccatcaggatcacccatttcagatcatccagttcgaactctgcgttatccagcgcgagcactcgctctatcaccatttcacgagtttcaaggttgagcacctgaatctgctcaaggaaaagcagaaacccacggcagctggcatccagtcgttcacactcttccggtgtataaatacgcatggagagaggatcgctggccagttgcatcggttctgccaacccttcctgataatcagcaagtttttccagccatagcagggcattgtagatatcttctcgctcaaaacctgcgtcggtaagatcctgttcaagtttgtcttgatccacacgcaactcagcttctgtgtgaatataggtttcaaacaaatacattagtacgtcgaacatggcatgccctcctcaatcggacatagccgccgggtacagctgcgatccatcctgctaactccagttcgagtagttgagtaactacctctggcacaggttggccggcacgttcagcgacgacgtcaacaggtgttacctcatctcctacgttagccaggagctcaggaaatggcaatgccacgtcttgctgatctggactataaaaactattttcaggggcgtctggcaaccagtgcaatccaaattgcaagttttccagaatttcttccggttccgtcacaagaatcgcaccttgttttattaaccagtgaggcccttcgcttcccggattccctattggacctggcaaggcaaaaacttctcgcccctgctcaagcgcacaacgtgctgtcaccaggctaccactacgcaaagccgcttccaccaccagtacacctttacttagaccactgataatgcgatttcttcgtgggaaattgtaagcaaggggtggaacatcgaggggaaattcgctgacgagagcgcccccctgttcaagcagactggcagccagtcgggcatgacggcggggatgaatggtattaagtccattccccaatacagcaatgctgacgccatttacctgtaaggctgctttatgcgctacaccatcgattccacgcgccagtccactcgtaattgtcactccacgcgtcgccagagtttcgcaaaataatcgtccccatcgctcgccataccaactatgcgcccgactccccactacggcaagctgaaaactatgcagcgcgtgcagttctccttcaacaaacagtgcgccggggtaatctgtcgtcgccagaagttgaggaggataaaattcgctgtccgcaggaattaaatgatggttgggttgctccaaccaacaaagactgctttcgatactctttcgtggaaaactaagaaagcgttgtgcctgccgcaatgtaagccctgtttgctgcaatacaaccgcatcaatatggctctgttttgccacccagtgagcgatacggaccatatcatcgccgtacaagctgctgatactcattaaacgcagccaaatttctgtatcgaccatccttatctccctgccataagcagccttagcaatctttgcgattggtcagtgatgctgtcaatcagagggggatttgtctagaatagaagaaataatctttctaactcctgaacacatctctggagatttatgagtgttttgcaagtgttacatattccggacgagcggcttcgcaaagttgctaaaccggtagaagaagtgaatgcagaaattcagcgtatcgtcgatgatatgttcgagacgatgtacgcagaagaaggtattggcctggcggcaacccaggttgatatccatcaacgtatcattgttattgatgttagcgaaaaccgtgacgaacggctagtgttaatcaatccagagcttttagaaaaaagcggcgaaacaggcattgaagaaggttgcctgagcatccctgaacaacgtgctttagtgccgcgcgcagagaaagttaaaattcgcgcccttgaccgcgacggtaaaccatttgaactggaagcagacggtctgttagccatctgtattcagcatgagatggatcacctggtcggcaaactgtttatggattatctgagtccgctgaaacaacaacgtattcgtcagaaagttgaaaaactggatcgtctgaaagcccgggcttaaggataagaactaacgtgagtgaaagtctacgtattatttttgcgggtacacctgactttgcagcgcgtcatctcgacgcgctgttgtcttctggtcataacgtcgttggcgtgttcacccagccagaccgaccggcaggacgcggtaaaaaactgatgcccagcccggttaaagttctggctgaggaaaaaggtctgcccgtttttcaacctgtttccctgcgtccacaagaaaaccagcaactggtcgccgaactgcaggctgatgttatggtcgtcgtcgcctatggtttaattctgccgaaagcagtgctggagatgccgcgtcttggctgtatcaacgttcatggtagtctgctgccacgctggcgcggtgctgcaccaatccaacgcagtctatgggcgggtgatgcagaaactggtgtgaccattatgcaaatggatgtcggtttagacaccggtgatatgctctataagctctcctgcccgattactgcagaagataccagtggtacgctgtacgacaagctggcagagcttggcccacaagggcttatcaccacgttgaaacaactggcagacggcacggcgaaaccagaagttcaggacgaaactcttgtcacttacgccgagaagttgagtaaagaagaagcgcgtattgactggagtcttagcgcagcacagcttgaacgctgcattcgcgctttcaatccatggccaatgagctggctggaaattgaaggacagccggttaaagtctggaaagcaagcgtcattgatacggcaaccaacgctgcaccaggaacgatccttgaagccaacaaacaaggcattcaggttgcgactggtgatggcatcctgaacctgctcagcttacaacctgcgggtaagaaagcgatgagcgcgcaagacctcctgaactctcgtcgggaatggtttgttccgggcaaccgtctggtctgatagtccactcttctaagcccggtcttgccgggcgtttttatacttatgaaaaaacaacgtaatttacgtagcatggcggcccaggccgttgaacaagtcgtcgagcaagggcaaagtttaagcaacattctgccaccgctccagcaaaaagtttccgataaagacaaagcacttcttcaagagttgtgctttggcgtactgcgtacgcttagccagttagactggctgattaataagttaatggcccgtccgatgaccggcaaacagcggaccgtgcattacctgattatggttggtttgtatcaactgctttatacccgcattccacctcatgctgcgctggctgaaacggttgaaggcgctatcgcaattaagcgtccgcaacttaaagggttgataaacggtgtattacgccagttccagcgtcagcaagaagagttattagccgagtttaatgccagtgatgcacgttatctgcatccttcctggttgctgaagcgtctgcaaaaagcgtatccagagcagtggcaatccatcgtcgaagccaataaccagcgtccgccaatgtggctgcgtattaatcgtacgcatcattcccgcgacagctggcttgcattgctggatgaagcaggaatgaaaggtttcccgcatgcggattaccctgatgctgtacgtctggaaacacctgcacctgttcatgcgctacctggttttgaagacggatgggttaccgttcaggatgcaagtgcacaaggttgcatgacctggcttgcgccacaaaacggtgaacacattttggatctttgtgccgcccccggcggtaaaacaacgcatatccttgaggtggcaccagaagcgcaggttgttgcggttgatatcgacgaacagcgcctctctcgggtttacgacaatttaaaacgccttggtatgaaggcgaccgtgaaacaaggtgatggccgttacccttctcaatggtgtggcgagcaacagtttgatcgcattttattagatgcgccttgtagtgcaaccggtgtgattcgtcgccatccagatattaaatggttacgtcgcgatcgcgatatcccggaactcgcgcaattgcagtctgaaattctcgacgccatttggccgcatttaaaaaccggtggaactctggtctatgccacctgtagcgtgttaccggaagagaatagcctgcagattaaagcctttttgcaacgtaccgctgatgccgaactttgcgaaacaggaacaccagagcaaccgggtaaacaaaatctacctggtgccgaagagggcgacggcttcttttacgctaagctaatcaaaaagtgatgagataacgggtcgcgactgatgaaaattatcattctgggtgccggccaggttggcggcacactggcggaaaacctggttggcgagaacaacgatattactgttgtcgataccaacggtgagcgtctgcggaccttacaggataaatttgacctgcgggtcgtgcaggggcatggctctcatccacgcgtattgcgggaggcaggtgccgacgacgccgatatgctggttgctgtaaccagtagtgatgaaaccaatatggttgcctgccaggtagcctacagtcttttcaacacccctaatcgcatcgctcgtatccgcagtccagactacgtgcgcgatgccgataagctatttcatagtgatgctgtgccgattgatcatctgatcgcaccagagcagttggttatcgataatatttaccgactgattgagtatcccggcgcattgcaggtggtgaacttcgctgagggtaaagtcagcctggctgtggttaaagcctattatggcggcccgctgattggtaatgcacttagcaccatgcgcgaacatatgccacatatcgatactcgtgtggcagcaattttccgccacgatcgccccattcgtccgcaaggtagcaccattgttgaagctggtgatgaagtgttctttattgccgctagtcagcatatccgcgcggtgatgagtgaattacagcgactggaaaaaccgtataagcggatcatgctggttggtggcggtaatatcggtgcagggctggcgcgtcgtctggaaaaagattacagcgttaaactcatcgaacgtaatcagcagcgcgctgccgaactggcggaaaagttacagaatacgatcgtcttttttggtgatgcgagcgatcaagaactactggccgaagaacatatcgatcaagttgatctgtttattgccgtcaccaacgatgacgaggccaatatcatgtccgccatgcttgccaaacgtatgggtgcgaaaaaggtgatggtattgatccagcgtcgcgcttatgtggatctggttcaggggagcgttatcgatattgcgattagtccacaacaagcaactatttctgcgttgcttagccatgtgcgaaaagcagatattgttggtgtttccagtttgcgccgcggcgtagcagaagctattgaagccgttgctcacggtgatgaaagcaccagtcgcgttgtcggcagagtcattgacgaaatcaagctaccgccaggaacgattattggagcggtggtacgtggaaacgacgtgatgattgccaatgacaatctgcgcattgagcaaggcgatcacgtaattatgttcctcacagataaaaagtttattaccgacgtcgaaagactcttccagccaagccctttcttcttgtaattaataaggcgtctaatgacgccttattatttccctttgattatcaaggattaattaaattcattcctggcaggaaaatggcttaacatttgttagacttatggttgtcggcttcatagggagaataacatgagcattattaaagaatttcgcgaatttgcgatgcgcgggaacgtggtggatttggcggtgggtgtcattatcggtgcggcattcgggaagattgtctctagtctggttgccgatatcatcatgcctcctctgggcttattaattggcgggatcgattttaaacagtttgctgtcacgctacgcgatgcgcagggggatatccctgctgttgtgatgcattacggtgtcttcattcaaaacgtctttgattttctgattgtggcctttgccatctttatggcgattaagctaatcaacaaactgaatcggaaaaaagaagaaccagcagccgcacctgcaccaactaaagaagaagtattactgacagaaattcgtgatttgctgaaagagcagaataaccgctcttaacaagcgccactaagcagaagaccagtggtaaaaaagtgatttactttcttgccactggcctcccagttcccccgattgccatgttttccttttcgcatgtaactgcctttccccttcttatttttctctacgcgctgtcggaataagggatcatgtagtaatgcttctatcgcattatcctttatctgccctttagtatgctgatatcgactcataaaaactccagttggttatttaacggcgcgagtgtaatcctgccagtgcaaaaaatcaacaaccactcttaacgccactcgccccttgttcaagagcttcaagaatgctacaataaacactgctatgagcagtcccacaacaggcatcgttaaggcgttgcaaggaacgctgcatactctgcaactcggctatccgtgcttcgacttcctgcaatctttcctgcacaatgcctttactctcctgacaggtatggtgttcaggatcgatgcggatgctcagcaactcgcggatgctctccagactgaaacctagttgtctggcatggcggataaatttcaatcgctggagatcgctttcggtatataggcgaaacccaccttcagtacgcacttcatgctccatcatctgctgtttttcgtaataacgaatcgtgtcgggtgttacttccgccatttttgccagctcaccaatgcgatacatacatactccattagttatcgttgattttgtccaacaacttgtcagcataatcgccgcgtaaaaaatcggtactcaatccagcttgtcgcagcttcaattccagtaaactcaatcgacggctaacctcttgatattgcggatcatcgtgacggatacctttgagaatatccagaagctgaattgcttctctccgttgctcaagttctggcggtaagcaaccggcattcttcagcaagcgataccccgcacgtaattccggtggcacgtgagaatcatcatccagtatcaatggttcgccgctacctgccaggttatcaaactcacctttcgcttgcgcttctgctatatggcgctctgcccactggtcaagtaaccacataaatactccaggggatgaacaaaaagagtacagctattgtagataagtggggatactacgggtataaaaaaacccgccggggcgggtttttttacgttgcttcagattactctgcagcagcttctgctttctcactacgatcaaccagctcgatgtaagccatcggcgcgttgtcgcctgcacggaagccacacttcagaatacgagtgtaaccaccggcacggctcgcgaaacgcgggcccagttcgttaaacagttttgccacgatctcgttatcacgagtacgggcgaatgccagacgacgattagcaacgctatcagtcttggcaagagtaatcagcggctcaactacgcggcgcagctctttcgctttaggcagagtcgtcttgatgatttcatgacgaaccagactacctgccatattgcggaacatagcctggcgatggctgctgttgcggttcagttgacgaccactcttacgatggcgcatgaccttatccttctcagtaaaaccttaacctgtgatccggttactcgtcagcgatgcttgccggtggccagttttccaggcgcatgcccagagacagtccacgggaagccagcacgtctttaatctcagtaagagattttttaccaaggttaggcgttttaaggagctcaacctcggtacgctgtaccagatcaccgatatagtggatagcttctgctttaaggcagttagcagagcggacagtcaattccagatcgtcaacagggcgcagcaggatcggatcgaactctggtttctcttctttcacttcaggctgacgtacatcacgtaagtcaacgaaagcttccagttgttcagccagaatggttgccgcacgacgaatcgcctcttcaggatcgattgtgccgttggtttccatttcgatgaccagcttgtccaggtcggtacgctgttctacacgcgctgcttcaacattgtaggcaatacgctccacagggctgtagcatgcgtcgaccagcagacggccgattgggcgctcatcttcttcgctatgaattcgggtagaagccggcacataaccacgaccgcgctgaactttgatacgcatgctaatagacgcgttctcatcggtcaggtggcagatcacgtgctgcggcttgacgatttcgacatcaccgtcgtgggtgatatcggctgcagtcacagggccaatgccagatttattcaaggtaagaataacttcatctttgccctgaactctcaccgccagccctttcaggttgagcaggatttccaggatatcttcctgaacgccttctttggtgctgtactcatgtagtacaccatcaatctcaacctcggtcaccgcgcaacccggcatgctactgagcagaatacggcgcagtgcgttacccagagtatggccaaagccacgctctaaaggctcaagggtcaccttggcgtgcgtgctactcacttgctcgatatcaaccaggcgcggttttagaaactctgtcacagaaccctgcattgtgtcctctctttggtactaagctttacttggagtaaagctcgacgatcaggtgttcgttaatgtccgcagacagatcagaacgctccggcttacgcttaaacgtaccttccatcttgccagcatcaacttccagccaggttggcttttcacgctgctcagccagctccagagcggctttcacgcgagactgcttcttcgctttctcacgaatgcttacaacgtcattcggactaacctgataagaagcgatgttaacaacacgaccgtttaccataattgctttatggctaaccagctgacgtgcttctgcacgagtggcaccgaagcccatacggtatacaacgttgtccagacgaccttccagcagagccaacaggttttcaccggtgttgcctttcagacgtgctgcttctttgtagtagttacggaactgacgctccagcacaccatagatacggcgaactttttgcttttcacgcaactgcacaccatagtcagacagacgcggtttacgcgcaccgtgctggccaggagcttgttcaattttacacttggtatcgatcgcgcgaacgccagacttaaggaataagtcggtgccctcacgacggctcagcttgagcttaggacccaaatatcttgccattttctttctccaacaaacctggaaaacgaggcgttatacgcgacgttttttcggcggacgacaaccgttatgagggatcggagtcacatcagtaatgttagtgatgcggaaacctgcggcgttcagagcacgaatagtagattcgcggcctggacccggacctttaaccataacttccagattcttgatgccgtattctttcacggcgtcagcgcaacgctctgctgcaacctgagctgcaaacggagtggatttgcgagaaccacggaaaccggaaccaccggctgttgcccaacccaacgcgttaccctgacgatcagtgatagtcacgatggtgttgttgaaagaagcatggatatgagccacgccgtcagagacttgttttcttacacgtttacgtgcacgaattggtgcctttgccattattcaatcaccccgattatttcttgatcggtttgcgcggacccttacgggtacgtgcgttggtcttggtacgctgaccgcgaaccgggagaccacgacgatgacgcaaaccgcgatagcaaccaagatccatcaggcgcttgatgctcatgctgatttcacggcgcagatcaccttcaacgacaaatttggcaacttcgtcacgcagcgtgtcgatttgtccttcagacagctcactgatcttaacatcttcagcgatacccgctgcagccaggatggctttagaacgggtcttgccgacgccataaatgctagttaatgcgattacggcatgcttatgatcaggaatgttaatgcctgctatacgggccactatgcactcctactatttaatatgtacgttccatgctgaaaagcccgttttcaggatactcaaatggaaacgcacagacatacaaaagattggctggctaatctagccagctcaacccaactttgcaagaaaaatatgcgaaaaaatcagccttggcgctgtttatgcttcggctcggcactgcaaatcacacggatgacaccatcacgcttaacgattttgcagttacggcataatttcttgacggaagcacgaactttcatttttactctccgtaacttctcgggcgaccaattatcggccgtagcctttcaggttcgccttcttcaatgcagactcatactgactggacatcatcagagtttgcacttgagccataaagtccataatcacgacaacaacgataagcagactggtcccaccgaagtagaacggtactttcattgcatcacgcatgaactccgggatcaggcagataaaggtaatatacagcgcaccaaccagggtcaggcgggtcattactttatcgatatacttcgccgtttgctctcccggacgaattcctggtacaaatgcaccggacttcttcaggttatctgctgtttcacgcgggttgaaaaccaacgccgtgtagaagaaacagaagaagatgattgcagacgcatagagtaacacataaagcggttgcccaggctgcaaatacaggctaattgttgtcagccagttccaaccagtaccgcccccgaaccaactcgcgatggtcgccgggaacagaataatactggaagcgaagattgccgggattacccccgccatattcactttcagcggtaaatgtgtgctctgtgcagcatagacacgacgaccttgctgacgtttcgcgtagtttaccacaatgcggcgttgaccacgctcaacaaatacaacaaagaacgtcactgcaaatactaatactgcaaccaacagcaacacgaggaagtgcaggtcgccttgacgcgcttgctcgatagtatgggcaatggctggcgggagtcccgcgacaataccggcgaagataatgatactaataccgttgccgatacctcgttcagtaatctgttcgcccaaccacatcaggaacatggttcctgtgaccagacttacaacagcggtgaagtagaatgcaaagcccgggttaatcaccaggccttgcataccaggcatattcggcagaccggtagcaataccgatgctctggaatattgccagcaccagagtaccgtagcgggtgtactggctgatcttacgacgaccagactccccttctttcttaatttctgccaacgttgggtgaaccaccgtcagcagctggataatgatgctcgcgctaatatacggcatgatccccagagcaaagatagaagcacggctgagagcaccaccagagaacatgttaaacatctcaatgatggtgcctcgctgttgctcaagcagtttggcaagtacagcggcatcaataccagggatcggaataaaagagccaatacggaacacaatcagcgcaccgataacaaacagcagtctgcgtttcagctcgcctaagccacctttggcactttgaaaatctaatcccggttgtttagccatctgctacttattcctcgattttaccgccagcagcttcgatagcagcacgagcgcctttagtaacacgcaggccacgaacagttaccggagtcgttacttcgccagccaggatcactttcgcgaactcgatctggataccgataatgttagccgctttcagcgtgttcaggtctactacaccgccttctactttagccaggtcagacagacgaatttcggctgtaatcgctgctttacgagaagtgaagccgaatttcggcagacgacggtacagaggcatctgaccaccctcgaaaccgcgacgtacgccaccgccagaacgagacttctgacctttgtgaccacgaccaccggttttaccgaggccagaaccgataccacgacccaggcgtttacccgcctttttggagccttcggccggagacagagtatttaaacgcatctcttactcctcaactttaaccatgaaggaaaccgcgttgatcataccgcgaatagcaggagtatcctcgcgctctacggtgtgaccaatacgacgcagacccaggccaagcagcgttgccttgtgtttcggcagacgaccgattgcactgcgggtttgagtaattttaatagtctttgccatggtttatttccccagaatttcttcaacggatttaccacgcttggcagcgaccatttctggagaattcatattttccaggccatcaatagttgcacgaaccacgttgatcgggttggtggaaccataggctttagccagaacgttatgaaccccagcgacttccagaacggcgcgcattgcaccaccggcgatgataccggtaccttcggaagccggctgcatgaatacgcgagaacccgtgtgaacacctttaacagggtgttgcagagtgccgttattcagcgcgacgttaatcatattgcgacgggctttttccatcgctttctggatcgctgctggaacttcacgcgctttaccgtaaccaaaaccaacgcgaccgttaccatcgccaactacagtcagagctgtgaaggagaaaatacgaccacctttaacggttttagatacgcggtttaccgcgatcagcttttcctgcagttcgccagcttgtttttcgatgtgagccatcttacacctctaccttagaactgaaggccagcttcacgggcagcatctgccagtgcctggacacgaccatgatattggaacccggaacggtcaaaggatacatctttgatgcctttttccagagcgcgttcagcgacagctttacccacagctgcagccgcgtctttgttaccggtgtacttcagttgttcagcgatagctttttctacagtagaagcagctaccagaacttcagaaccgttcggtgcaattacctgtgcgtaaatgtgacgcggggtacgatgtaccaccaggcgagttgcgcccagctcctggagcttgcggcgtgcgcgggtcgcacgacggatacgagcagatttcttatccatagtgttaccttacttcttcttagcctctttggtacgcacgacttcgtcggcgtaacgaacacccttgcctttataaggctcaggacgacggtaggcgcgcagatccgctgcaacctggccgatcacctgcttatcagcgcctttcagcacgatttcagtctgagtcggacattcagcagtgatacccgcaggcagctgatggtcaacaggatgagagaaacccagagacaggttaatcacattgcctttaaccgctgcacggtaacctacaccaaccagctgcagcttcttagtgaagccttcggtaacaccgataaccatactgttcagcagggcacgcgcggtaccagcctgtgcccaaccgtctgcgtaaccatcacgcggaccgaaggtcagggtattatctgcatgtttaacttcaacagcatcgttgagagtacgagtcagctcgccgtttttacctttgatcgtaataacctgaccgttgatttttacgtcaacgccggcaggaacaacgaccggtgctttagcaacacgagacattttttcctccgattaggctacgtagcagataatttcgccaccaagaccagcctggcgcgctgcacgatcagtcataacacctttagaggtagaaacaactgcgatacccagacccgccataactttcggcagctcatctttacgtttatagatgcgcagacctgggcggctgacacgctgaatgctttctacaacagctttgccctggaaatacttcagagtaagttccagttcaggcttggtgtcgccttcaactttaaaatcttcaataaaaccttcttccttcagcacgttggcgattgccactttcagcttggaggaaggcatggtgaccgcagctttgttcgcggcctgaccgttacggatacgggtcagcatatccgcgatcggatcttgcatgctcatctgtctttactcccgtgattcaattggtgacaattaccagctagcctttttcagacccgggatttcaccgcgcatagcggcttcacggaccttaatacggctcaacccgaacttccgcaggaaaccatgcggacgacctgtttgacggcagcggttacgctgacgagacgggctggaatcacgcggcagagtctgcagcttgagaacagcgttccaacgatcttcgtcggaagcgttcacatcagagatgatcgctttcagttcagcgcgtttcgcgaagtatttatcagctaaagctacgcgttttacttcgcgtgctttcatactttgcttagccatttagtaaccctaccttacttgcggaacgggaagtcaaaggcagccagcagagcgcggccttcttcgtcagatttcgcagtagtggtaatggtaatatccaaaccacgaacgcggtcgactttatcgtagtcgatttctgggaagatgatctgctcacggacacccatgctgtagttaccacgaccgtcgaaagacttagcggacaggccacggaagtcacggatacgaggtacagcaatagtgatcaggcgctcaaagaactcccacatgcgttcgccacgcagagttactttacagccgatcggatagccctgacggattttgaagcctgcaacagatttgcgtgctttggtgatcagcggtttttgaccggagattgctgccaggtctgctgctgcgttatccagcagttttttgtcagcgatcgcttcaccaacacccatgttcagggtgatcttctcgacccgagggacttgcatgacagaattgtagttaaactcagtcatgagttttttaactacttcgtctttgtagtaatcatgcagtttcgccatcgtactactccaaattacttgatagtttcgctgttagacttgaagaaacggacttttttaccgtcttcgaatctaaagcctacacggtcagccttgccggttgccgcattgaagattgctacgttggaaacctgaatagcggcttctttttcaacgatgccacccggttggttcagggccggaaccggcttctgatgtttcttaaccaggttgataccttcaacaatgaccttgccggaagacaggacattcttaactttaccgcgtttacctttatctttaccggttaacacgataacttcgtcatcacgacggattttcgctgccatgattcgctccttagagtacttctggtgccagagagataattttcatgaacttctcactacgaagctcacgagttaccggcccaaaaatacgcgtaccgataggctgctcgctgttgttgttcagaagaacacaagcattaccatcgaagcgaatgacagaaccgtccgggcgacgaacacccttcttggtgcgcaccactaccgccttcagcacatcaccttttttgaccttaccacgcggaattgcttctttgatggtgatcttgatgatgtcgcctacgcctgcgtagcgacggtggctgccacccagaaccttgatacacattacgcgacgtgcaccggagttgtcggcgacgttcagcatagtctgttcttggatcattttagtgctccgctaatgtcaactactactgagacccgaaaatcaggtcgttaaaaatccccatatcgagggcgcggcattataacaccgcttcaaggatatgggtagaaaaaataaacggctcatttctgagccgtttattcgtattgagagagtgtactgtattacagaaccgctttctctacaacgcgaaccagcgtccaggatttagtcttggacagcggacggcattcgcggatttcaaccacgtcaccgataccgcattcgttgttctcgtcatgtacgtgcagtttggtcgtacgcttgatgaatttaccgtagatcgggtgtttcacaaaacgttcgatagcaacaacaatggatttctccattttgtcgctaacaacgcgaccttgcagagtacggattttatcggtcattacgcacccgccttctcgttcagtaaagtcttaacgcgtgcgacatcgcgacgcacttgcttcaacaggtgagactgttgcagctggccacttgcagcctgcatacgcaggttgaactgctcacgcagcaggttcagcagctcggtgttcagctcttcaacgctcttctcacgcagctcttttgctttcattacatcaccgtcttagttacaaaggtggttttaatcggcagtttcgctgctgccagcttgaatgcttcacgggccagctcttccggaacaccgtccatttcatacaggactttacccggctgaatcaaggcaacccaatactccacgttacctttacctttacccatacgcactgccagcggcttttcagtgatcggtttgtccgggaacacacggatccagatcttaccttgacgcttaactgcacgggtcatagcacgacgtgctgcttcgatctgacgggcagtcagacgaccacggccaacagctttcagaccgaagctgccgaagctaacatccgtaccctgcgccagaccgcggttacggcctttgtgcattttacggaattttgtacgctttggttgtaacatcagcgacgctccttatttacggcctttacgctgctgctttttaggctgagcagccggtttttccggttgttcaacagcagccataccacccaggatctcgcctttgaagatccacactttaacgccgattacaccgtaagtggtgtgcgcttcagaggtgttgtagtcgatgtcagcacgcagagtgtgcagcggtacgcgaccttcgcggtaccattcggtacgtgcgatttccgcgccgcccagacggccgctaacttcaactttaatacctttagcgcccagacgcattgcgttctgtacagcacgcttcatagcacgacggaacataacgcgacgttccagctgagaagtgatgctgtcagcaaccagttttgcgtccagttcaggcttacgaacttcggcgatgttgatctgtgcaggaacgccagcgatgtccgctacgaccttacgcagtttttctacgtcttcaccttttttaccgataacgatacccgggcgagcagtgtgaatggttacacggatgctcttagccggacgctcgataacgatacgagatacggacgctttagccagttccttagtcaggtactgacgtactttaaaatcgctgtccaggttgtcagcgaattctttggtgttcgcaaaccaggtagagttccatggttttacaatacccaggcgaataccattaggatgtactttctgacccattgctagtctccagagtctcagcgatcggacacaaccacagtgatgtggctggtgcgcttcaggatgcgatctgcacgaccttttgcacgcggcataatgcgcttcatgctcgggccttcgtctacgaaaattttcgtaactttcagatcgtcaatgtcagcgccatcgttgtgttcagcgttagcaatggcagattccagaactttcttgaccagtacagccgctttcttgttggtgtaggtcaaaatatccagagcctggctcactttcttaccgcgaatcaggtcagcaacaaggcgaaccttctgagcagaagaacgagcatggcgatgtttagcgatagtttccatctcttcctcctaccttatttcttcttcgcttttttatcagcagcgtggccgcgataagtacgagtcggtgcgaattcacccagtttgtgaccaaccatttcgtcggttacaaataccggaacgtgctgacgaccattatggacagcgatggtcaaaccgatcatgttaggaaagatcgtactacgacgggaccaagtgcgcaggggcttcttgtctccgctttccaccgctttctctaccttcttcagcaagtgcaggtcaataaaaggacctttcttgagagaacgtggcatggcttatcctctaaaattatttgctacggcgacgtacgatgaatttatcagtacgcttgttgctgcgggtcttcttacctttggtctgaacgccccacggagttaccgggtgcttaccaaagttacgaccttcaccaccaccatgtgggtggtctaccgggttcatcgcggtaccgcgaacggtcggacgaacaccacgccagcgtgcagcacctgctttacccagaacgcgcagcatatgctcagcattgccaacttcgcccagagttgcacggcagtctgcttctactttacgcatttcaccagaacgcagacgcagggtgacataagcaccatcacgagcaacgatctgaacgtaagtaccagcggaacgtgccagctgaccgcctttacctggtttcatttctacgttatgaacagtagaaccaaccgggatgttgcgcatcggcagggtgttacctggtttgattgcagcatcaacgccagactgaatctggtcgccagctttcaggcctttaggggccaggatgtaacggcgttcaccgtctttgtacagaaccagcgcgatgttcgcggaacggttcggatcgtactcaagacgttcaacaactgccgggataccgtctttgttgcgtttgaagtcaacaatacggtaagcctgcttgtggccaccaccgatatgacgagtggtgatacggccattgttgttacgaccaccggatttgctgtttttttccagcaacggagcaaaaggtttgcccttgtgcagctcagggttaaccactttaactacgtggcgacgacccggagatgtcggtttacatttaacaactgccattgtattactcctccgacttactcagcgccgccaacgaagtccagattctggccttctttcagggtgacgtaagcttttttccagtcgctacgacgaccgatacgctgtccgtgacgtttaactttccctttaactaccagggtgttaacgacttcgacttcgacttcaaacagtttctgcacagcagctttgatttctgctttggtcgcgtctttagcaactttgagtacgatggtgttggatttttccatcgcagtagacgctttttcagaaacgtgcggtgcacgcagcaccttcagcagacgttcttcacgaatcatgccagcatctcctcaacttgcttaacagcatcagcagtcattacgactttgtcgaaggcgatcaggctaaccgggtcgataccagttgcatcgcgtacgtcaaccttgtgcaggttgcgcgcagccaggaacaggttttcgtccagctcaccggtgatgatcagcacatcttccagagccatgtctttcagtttctgtgccagcagcttagttttcggcgcttctacagagaacttctcgacaacgatcagacgatcctgacgtaccagttcggacaggatgcttttcagcgcgccgcggtacatcttcttgttaactttttgactgtggtcctgcggacgagcagcaaaggtcacgccaccagaacgccagatcgggctcttgatagaaccagaacgcgcacggccggtgcctttctggcgccacggttttttaccggaaccagttacttcagcacgagtcttctgagcacgagtaccctgacgagcaccagctgcataagcaacaacaacctggtgaaccagcgcttcgttgaaatcacgaccgaaggtagtttcggaaacagtcagcgcgctctgcgcgtctttcaatactaattccattgctatctccttacgccttcacagctggtttaacgatcaggtcgctaccggttgcacccgggacagcacctttaaccagcagcaggttgcgctcagcgtcaacgcgtactacgtcaaggctctgaacggttacacgttcgttacccatctgacctgccattttcttgcctttgaacactttgcccggagtctggttctgaccgatagaacccggaacgcggtgagacaaggagttaccgtgagtagcgtcctgggtacggaagttccagcgcttaacggtacctgcgaaacctttacctttagaggtgccagttacgtcaacttttttaacgtcagcaaacagttcaacgctaatgctctgacctacagtgaactcttcgccttcagccaggcggaattcccacagaccacggccagcttctacgccagctttagcgaagtggccagcttcaggcttggtcacacggttagcttttttagcaccggtggtcacctgaatagcacggtagccatcgttagccaggtctttaacctgagtaacgcggtttgcttcaacttcgattacggttactgggatagaaacgccgtcttctgtgaagatacgggtcatacccacttttttaccgactaaaccaatcattgtttcaacctctcaatcgctcaatgacctgattaacccaggctgatctgcacgtctacaccggcagccagatccagacgcatcagagcatcaacggttttctcggttggctcaacgatgtcaaccagacgcaagtgagtacggatttcgtactgatcgcgcgcgtctttgttgacgtgcggggagatcagaacagtgaagcgctctttgcgtgtcggcagcgggatcggaccacggacctgcgcaccagtgcgcttggcagtctcgacgatttccgcggttgcttgatcgatcagacgatgatcaaacgctttcaggcggatacggattctttggttctgcatgagaccagagctccaattattttataaacgaaaatgattactcctcagacccattacgattgatgggagagtgtaaccgttcttacgtagctccccgattgggagcattgttaggtagccaaattcggctaactgaggttcagattgaacctgctgtcaactacgacaagcccgcgcattatacatacttaaccaccgaacgcaagcgtattgctagtaaagtaaacagccttcgggttatctctcaagttcgttcagtgcatttttgacacgctctcttaaaccggctttctcttcgctttcttccacagtattttcttcgtcttcagaagaagagggggcattctcaaccgcgacgcctgggtcatcttcctcctcgacggattcgacgacggggagtggctgttttttgaagaaatagtgttgtgtactttgtttaaaagcgggcgtttcagcctctacagtgacttcggcttttactatccaaagcacccatagctgcctggcatacccaccaaccagcaccattcctgcaaaccacaggcaaatcagtaataaacaaattacatatattatggtgctgtgtttttgtcgggagaagataccagggtgacctgtttctttctgctcacgcgcggcgatatagaattcaaacattataatcccttgtgacgtaaaaactgcaaaacaaaagtcctacgcaggaattatttacgttttacgagaacccttcaatatgaattaaattacggcattaaaaataagaaaaaagcctgacaaatgaagcattttaaaaacagaaacattcatatttaaaatgttaaattgaattgatattttaaatatgaataatttattcgttctgacagtacgaataagatatgccgtcaacaaatgcaaaaagggcgccgaagcgcccttttcaattcaaaactaattaacgtgtaattagcccagaactttagcaacaacgcccgcgccaacggtacggccgccttcacggattgcgaaacgcagaccgtcgtccatcgcgatcgggtggatcagggtaacaaccattttgatgttgtcgcccggcattaccatctctacgccttccggcagttcgatggtaccagtcacgtcagtagtacggaagtagaactgcggacggtagcctttgaagaacggagtatgacggccgccttcatctttggacagaatgtacacttcagattcgaacttggtgtgcggcttgatggtgcccggcttagccagtacctgaccacgttcgatttcttcacgtttgataccacgcagcagaacacctacgttctcaccagcacggccttcgtccagcagtttgcggaacatttcaacgccagtacaggtagacttctgagtctctttgataccaacgatttcaacttcttcaccaactttgatgataccgcgttctacacgaccggtaacaacggtaccacgaccggagatggagaatacgtcttcgatcggcagcaggaacggcttgtcaatcgcacgctctggttccggaatataagaatccaggaagccagccagttccaggattttcgcttcccactctgcgtcgccttccagcgctttcagagcagaaccacgaacgatcggagtgtcgtcgcccgggaagtcgtactgagacagaagttcacgaacttccatttcaaccagttccagcagctcttcgtcatcaaccatgtcgcatttgttcaggaacacgatgatgtacggaacgcctacctgacgacccagcaggatgtgctcacgagtctgcggcatcgggccgtcagtcgcagcaactaccaggatcgcgccgtccatctgagcagcaccggtgatcatgtttttaacatagtcggcgtgccccgggcagtctacgtgtgcgtagtgacgggtcggggtgtcgtattcaacgtgagaagtgttgatggtgataccacgagctttttcttccggcgcgttatcgatctggtcgaatgcacgagcagcaccgccgtaggttttagccagtacggtggtgattgcagcggtcagagtagttttaccgtggtcaacgtggccgatagtaccaacgttaacgtgcggttttgtacgttcaaatttttctttagacacggctatattccttactatagtgctctccccttcaggagagagcacgggactttggtattaacccttaggcttatttaccacgggcttcaattacggcctgagcaacgttactcggcgcttcatcatacttcaggaattccatagtgtaacttgcacgacctttggtcagagaacgcagctgagttgcgtatccgaacatttcagacagcggtacttcagcgtggatcttaacgccagtaacttcagattcctgacctttgagcataccacgacgacggctcaagtcaccgataacgtcaccggtgttctcttccggagtttctacttcaaccttcatgatcggctcaagcagaactggtttcgctttcttaaagccttctttaaaggcgatagaagcagccagtttaaacgccagttcagaggagtcaacgtcatggtaagaaccgaagtgcagacgaatacccatgtctactaccgggtagcctgccagcggacctgctttcagctgttcctggatacctttatcaacggccgggatgtattcgccagggattacaccacctttaatgtcgttgatgaactcgtagcctttcgggttactacccggctccagcgggtacatgtcgataacaacatgaccatactgaccacgaccaccagactgtttcgcgtgtttaccttcaacatcggtaactttctggcggatagtttcacggtaagcaacctgcggtttacctacgttcgcttcaacgttgaattcacgcttcatacggtcaacgatgatgtcgaggtgcagttcgcccatacccgcgatgatggtctggttagattcttcgtcagtccatacacggaaagacgggtcttctttagccagacggcccagagccagacccattttttcctggtcagctttggttttcggttcaactgcgatggagattaccggctcagggaattccatacgttccagaatgatcggcgcatccgggtcacacagggtgtcaccagtggttacgtctttcagaccgatagcagcagcgatgtcgcccgcgcgaacttctttgatctcttcacgtttgttagcgtgcatctgaacgatacgaccgaaacgctcacgtgcagctttcacggagttcagtacggtatcaccagagttaaccacaccggagtaaacacggaagaaggtcaggttaccaacaaacgggtcggtagcgattttgaacgccagtgcagagaacggctcgtcatcacttgcgtgacgttcagccggagtgtctttaccgtcgtccaggataccgttgatcgcaggtacgtcaaccggggatggcaggtaatcaattaccgcatccagcatcgcctgaacacctttgttcttgaacgcagaaccacaggttaccaggatgatttcgttgttcagaacgcgctgacgcagagcacctttgatttctgcttcagtcagttcttcaccacccaggtatttttccatcagctcttcagaagcttcagctgcggattcgatcaggttctggtgccattcgttagccagttcaaccatgtctgccgggatatcttcgtattcgaaggttacgccctggtcagcgtcgttccagttgatagctttcattttcaccaggtcaacaacaccggtgaaatgttcttcagcaccaatcgccagctgcagcggaaccgggttcgcgcccagacgggttttgatctggttaacaactttcaggaagttcgcacccatgcggtccattttgttaacgaacgcaatgcgcggaactttatatttgtttgcctgacgccatacggtttcagactgcggctgaacaccaccaactgcgcagtaaaccattaccgcaccatcgagaacacgcatggaacgttctacttcgattgtgaagtcaacgtgccccggggtgtcgatgatgttgatgcgatgcggctcatactgcttagccataccagaccagaatgcagtagtcgcagcggaagtgatggtaataccacgttcctgctcctgctccatccagtccatggttgcagcgccgtcatgaacttcaccgattttatggtttacaccggtgtagaacagaatacgttcggtagtagtggttttaccggcgtcgatgtgcgcactgataccgatgttacggtagcgtgcgatgggtgttgtacgagccatttgtttcctcgtttatcttttaggcgttcaatttaagtagcccaaagcgggctgcttactggaagcgcccgcctggtgactaaaactccgaagggataaccaacggtagtgtgcgaacgccttgttggcttcggccatacggtgaacgtcttcacgtttcttaactgcagtacctttgttttctgcagcatcagaaagttcgttcgccaggcgcagagccatggatttatcaccgcgtttacgagcagcttcaacgatccaacgcattgccagagcattacgacgaaccggacggacttcaactggtacctgataagtagaaccaccaacgcggcgagacttaacttctacagtcgggcgcacgttttcgagagctacttcgaatgcttccagttcagatttaccagagcgctgagccagggtctccagcgcgctgtatacgatagattcagcagtagattttttaccatctaccatcaggatatttacaaatttagccagcagttcacttccgaacttcggatccggcagaattttacgctgaccaatgacgcgacgacgtggcatggaaatactccgttgttaattcaggattgtccaaaactctacgagtttagtttgacatttaagttaaaacgtttggccttacttaacggagaaccattaagccttaggacgcttcacgccatacttggaacgagcctgcttacggtctttaacgccggagcagtcaagcgcaccacgtacggtgtggtaacgaacacccgggaggtctttaacacgaccgccacggatcaggatcacggagtgctcctgcaggttgtgaccttcaccaccgatgtaggaagtcacttcgaaaccgttagtcagacgaacacggcatactttacgcagcgcggagttcggtttacgaggagtggtagtatatacacgagtacatacgccacgtttttgcgggcatgcttccagcgcaggcacgttgcttttcgcaactttgcgagcacgtggtttgcgtaccagctggttaactgttgccattaaatagctcctggttttagcttttgcttcgtaaacacgtaataaaacgtcctcacacaatatgaggacgccgaattttagggcgatgccgaaaaggtgtcaagaaatatacaacgatcccgccatcaccaggccatctggctggggtgcttaaccgtaagtctgacgaaatcagtatagtcaatgagaatgatgtcgttgctaatttgaccagtcaaaccgcgggcaataaggtcttcgttcagggcatagaccttaatgggggcattacgcagactttcaaggtagcggttaccgtcaactgcggcagttacgccatcttgcaataatagcagttcgtctccttcactgagcagacgcagcagcgcagcaaaatccgtcagccagggactgcgatgtaatgtgtgcagcataaacgcctcaaaacctcaaaataacatcgtagttggcgagttcgcggcgtaaggcatctgcttcgagcggcgtggcttcgacaacaaagggtgtctgcggatctaacccgcgttcgcgcagactagccgcacaaacccagcactgttcaatgtcgtacagacccaacaatttaaaagtggcaatgtaatcacgcgccagcactgcatcgggcttttgtcctggcagcagctgaaaaacgccatcagctataaagaagacagccagatcgtcagttaatgcggaagttgccagtaaagcatctaaaccttcccggcctgcggctgtaccatgaggtgcagtagaaaaaacaaacgcaattcgtttcatcagaactgtaccaccctgtcacaggtcaggctggcttccgccagcgccccaagtccgcttaaggtaaatccctgctgaaggttactgctagccagccccagtcttccggcctccgtttcatcaacaacgccacggcgtaatgctgccgctacgcagatattcagcgccacaccatgttgcgcattcagttgttgccaggcccgtacgaggtcaaattcgtcacttgccggagaggtcaattggttagcgttatagaccccttcccgatagaaaaagacgctgcttaactcatggccatctgctatcagcgcctgcgcaaactgaaaagcactactcgcctgttgcgtaccgtatgctggcccggtcaccacgatggcaaaacgcattacttatcttgcccctggaaatcaccgctcttgaactggcggatgtagagatagacagtgtgtttggagatgttcaggcggtcagcaacctggttgatcgcatctttaatatcgaagatccctttctcgtagagattcagcacgatctgacgatttttggcgttattagaaacattgcgatcggcattcacttcttcgatggtgaactccagcgtttgggtaaccagatcttcaacagaagaggcaaagttgacgctactaccgacatccggggtttctggcggcacaaaggtgctcataatctggctgaagggaacatcaagattcatattgatgcacagcagaccaattacacgctgttcgcggttacgaatcgcgatagtcagggacttcattaatacgccgcttttggcgcgagtaaagtagcatttagaaacgctgctatccgctcccgtcatatcgtgcagcatacgtagcgccaggtcagtaattgggctaccaatcttccggcctgtatgttcaccgttagcaatgcgaatggcactacattttagatcctgcaaagagtgcaaaacgatttcacagtgggagccaataagcatcgctaacccgtccaccaccgcttcgtaggatttcagaatatcaaaatcggtctggtcgaaaggacgttgatccagtaaatccaactcactggtttcgttggttaaaaggctcctggacatgaaaaaaaacactccttttcaggagcctgtcgttaacttttcagggcaggctcattaatgatgcgggtaactaaattaatacagcggaggttccgctttccagcactaattatatccggcctgtaataaaaaaaccgccgcctggtcaggcggcggttcttaatgcttattttttagcagaatctgcggctttcgcatcagcttccggctttgcatcagccttcggcgctggtttcacatccagcagctctacgtcaaacaccagggtagaattcggtgggatccccggaacacccgctttgccgtaagccagttctggtggaataaccagtttgatcttaccgcctttcttgatgttcttcagaccttctgtccaacccgggataacaccgtccagacggaaagaaagcggttcaccacgggtgtaagagttgtcgaactctttaccgtcgatcagcgtacctttgtagttcactacaacagtatcgctgtctttcggtgcttcgcctttaccggcttctactacctgataaaccagaccagtactagaggttttcacacctttctctttggcaaatttctcgcggtactctttaccttttgcttcgttatcagccgcgtctttttccatcttcgcctgagcagaagacttcacgcgagcttcgaatgcttgtagagtctgttcgatctcttggtcggagagtttgcttttatcagcaaatgcatcctgaacaccagcgatcagctgatctttatccagtttgatgcccagtttttcttgttcttttagagagttttccatgtaacgacccaggctggcacccagtgcataagcacttttctgatcgtcatttttgaacgctgctttgctgtcagcagctgtagcaggttttgcagcttcagcagcaaaagtgattggtgcatgcagggcaacggccattgtggtcgccagcagcgttactttaaacagacttttcatccatatctccaggatcggggcatctcaccccagggttaactattatcagaagggtactataaagcgttgtcgaacaaatctacatacagacacgccctattatcatctattttcagactctttttgtttaaattagtttcgatgaccgcgaaatgagtgctgtctcgggcagcaaagttaagtagaatccgcggcgaccattcgacaaaagaggtgaatcatgcaggatttaagtttggaagcacgcctggcagagctggagagccgactggcttttcaggaaatcaccattgaagaactgaacgtcacggtgaccgctcatgaaatggagatggcgaaactgcgcgatcatctgcgtctgctgaccgagaagttaaaagccagccagccgagcaacatcgcgagccaggctgaagaaacgccaccgccacattattgaggcgtaaaaaaagcggggattccccgcttttttgtcactttttcggtattagtggcaaccgcaaccgccgttgcctttaccgccacagcagccttcgccaccgtgttcatgaccgtgatcgtggccatgaccgccgcagcaaccgtcgtggtcgtgatcgtggtggtgatcgtgcgcgccgtgaacgtgaccatgagccagttcttcttcagtcgcttcgcgaatcgccacaacttcaacgttgaatttcaggttctgaccggccagcatgtggttaccatcaaccacgacgtgatcgtcttcaaccgcagtgatttcaaccggtaccggaccctggtcggtttcagccaggaaacgcatacctacctgcagttcatcaacgcccataaatacgtctttaggaacacgttgcaccaggttttcgtcgtactgaccgtaagcgtcgttcgcgccaacagcgacatcaaatttgtcgccaacttcatgaccttccagcgccgtttccaggccagagatcagggaaccgtgaccatgcaggtagtccagcggcgcactcaccggagactcatcaaccaacacaccgtcttctgtacgtacctgataggccaggctgaccaccaggtcttttgctactttcatgatatctcctgagcatgggaagaatagtggcgcagattgtagcggaattctgcagccgtgtactcactagcttaaaaaaactcggcgcatatcgttagtccggatgaaaaatcccgatcacttgctcatctttgcgaacgtgatcgcgggcttctttgtctgcttctcgcatctgatgtccgcacttaacacattcaacaatatcaatattattttcgcgccacatcgccatactatcctgcgcctgacaggccgggcattttgcgcccgcaataaaacgttttcggattgccatctttaccctttactcaaattcatcccagccgtccagctggcgtcgttcttgttgcatttcacgctggaaaatctcttccagttcgcgtcgggcttccctggcgcgagaaatttgtacggtatcggcatgcattgggatgagctctcgcagcatccgcatatccaggcggcgaaaatgcagttgcgctcgctgtgcctgatgcggatgcatgccaagcgtgaccagcgtcttgcgccccagctctaacgcactggagaatgtttcacgggaaaactgcgtcacccctgcctgtaataactcatgcgcttccacacgtccgcgcgctcgcgcaagaatatgcaaatgcggaaagtgctgttggcatatttccaccagcttcatggtgtcttccggctcgttacaggtaatgacgatagactcagcggcctctgcacccgcagaacgtaaaagatcgacctgcgtggcgtcgccgtaataaactttgtagccgtatttacgcatcaggttaacggcgctgatatcccgctccagcacggtaatgcgcattttatttgccatcagcaaacgaccaatcacctgaccaaaacgcccgaagcccacgacaatgacctggggtttatcatcgttgacccacggtttttcgtcttcttcttccggtccgttaaactggcgggatagccatttatccaccagcttcatcagcaacggcgtggtcatcatggaaagcgtcaccgtcaccagcaacaacgccatctggtcgccctggaataagcgttgactagaagcggtagaaaagaggacaaaggcaaactcaccaccctgactcaacacgccagcaaactgcatccgctcactgctacgcacgccatacaatcgcgccagcagatacagcacgagaattttcaccgccaccagcacaaccacgcttatcactacccacaacagatgggtataaagcaccccgaggttgagactcatgccgacagagataaagaacaaaccgagcagcaagcctttgaagggatcgatagccgtttccagttcatggcgatattcactttccgccagcagcacgcccgcaataaatgtaccgagcgccatgctcagccccagcgcatccataaacaatgcggaacccaacaccagcagcagcgtcgcggcggtgaacacttcccgcacgccagaagctgcaataaagcggaataccggacgcagtaaatagcgcccaccaatcagcatgccgacaaacgccagcaccttcatgccgaccttcatccagtcgaaatgttcgtctgcgctccccgccaacaacggcactaacgccagtgctgggattactgccagatcctgaaacagcagaacgctaaacccgagctggccggattcgctgcgattcatccctttctcacgcatcaattgcaacgccattgcagtactagacatcgcaaggccaatgccaccgaccaccgccgcctgccaggcgaaatccgtcagcatcaataatcccgccagcaacgccgcgcttaacagcacctgtgccgcgcctacgccaaaaatgctacgccgcagttgccaaagtttggagggattcaactcaaggccgatgataaacatcaggaataccacgccgagttcgctaaagtggaggatctcatcgacgtcgctaataaaccccagcccccacgggccaattgcaatccctgccagcaaatatcccaacacagcgccaatacccagccggcttgccagcggcaccgcagccaccgccgcgaagagaaacagcactcctgcgagtaaaaaatcggaaccttccatcagcggcctcctggagacagcggatttgccagccagtcaccgtaggctctggcgtggctcgccagctcctgtgcgctttgccgtctcgcccagtaaataatgatgggacttaaccaatgcatccggcacatgcccgccgccagttcaaaggggcgcagcacatcgctcatcgggtagcgattcagcgcgtcataacggtaagcactttccggctcgccggtggtaatcacgctacgccagtactttcccgccagttggtttcctcccggcccgctggcaaaaccacgacttaatacccggtccagccactctttcagtagcgccgggcagctataggtataaagaggatgctgaaagacaatcacctcgtgctcgcgcagtaatgcctgctcacgggggatatcaataaaaaaatcgggatagtgcgcgtaaaggtcgtgcacggtaacattgctgagctgcgtggccggtttaagcagtacccggtttgccacgctgtcctgagattccggatgggcatacagcagcaaaactttcgctggctgagacatcatccccctcccggtatggtttttgtgtatagtcgctgttttgggctaccattgcgcccggtgcggcagctcgcccatacattacattatcataatgataagttaacatagtctgaacatacggcaccttatgattgttttctccagcttacaaattcgtcgcggcgtgcgcgtcctgctggataatgccaccgccaccatcaaccctgggcagaaagtcggcctggtgggtaaaaacggctgtggtaaatctaccctgctggcattgctgaaaaatgaaatcagcgccgacggcggcagctacacctttccgggaagctggcaactggcgtgggtgaatcaggaaacgccggcgttaccgcaagcggcgctggaatatgtcattgacggcgaccgtgaatatcgtcaactagaagcgcagctacacgacgccaacgaacgtaacgacgggcacgccattgcgaccattcatggcaagctggatgctattgacgcatggagtattcgctcccgtgctgccagcctgctgcacggcctcggtttcagcaatgaacaactggagcgcccggtaagtgatttttccgggggctggcgtatgcgtcttaaccttgcccaggcgctgatttgccgtagtgacttgctgctgctcgacgaaccgactaaccacctcgatctcgatgccgttatctggctggaaaaatggctgaagagctatcagggcacgctgatcctgatctctcacgaccgcgacttcctcgatccgatcgtcgataaaattattcatatcgaacaacaaagcatgttcgagtacaccggcaactacagtagctttgaagtacagcgcgccacccgtctggcgcagcaacaagcgatgtacgaaagccagcaggaacgcgtagcgcatctgcaaagttatatcgaccgtttccgtgccaaagccaccaaagcgaagcaggcccagagccgcattaagatgctcgagcgtatggagctaattgcccccgcgcacgtcgacaacccgttccgctttagcttccgcgcgccggaaagcctgccaaatccgttactgaagatggaaaaagtcagcgcgggctatggcgatcgcattattctcgacagcattaaactgaacctggtgcccggcagccgtattggtctgttaggccgcaatggcgcgggtaaaagcacattaatcaaactgttagccggtgaacttgcgccagtcagcggtgaaattggtctggcgaaagggatcaaactcggctacttcgcccagcatcaacttgaatacctgcgcgccgacgaaagtcctattcaacatctggcacgtttagcgccgcaggagctggaacaaaaactgcgtgactacctcggcggctttggtttccagggcgataaagtaaccgaagaaacgcgccgcttctccggtggggaaaaagcccgcctggtgctggcattaattgtctggcagcggccgaatctgctgctgctcgacgaaccgactaaccaccttgacctcgacatgcgtcaggcactcaccgaagcattaatcgagtttgaaggcgcgctggttgtcgttagccacgaccgtcatttgctgcgttccaccactgacgatctctacctggttcacgatcgtaaagtcgaaccgttcgacggcgatctggaagattatcaacagtggttgagcgacgtacaaaagcaggaaaaccagaccgacgaagcgccaaaagagaatgcgaacagcgcccaggcacgtaaagatcagaagcgtcgggaagctgagctgcgtgcgcaaacccagccactgcgtaaagagattgcccgtctggaaaaagagatggagaagctgaacgcgcaactggcgcaggcggaagagaaactcggcgacagcgaactgtatgaccagagccgtaaagcggagttgaccgcctgcctgcaacagcaagccagcgccaaatccggcctggaagagtgcgaaatggcatggctggaagcccaggagcagcttgagcagatgctgctggaaggccaaagcaactgatggcgcagataacgacgaccgatgccaatgaattcagcagcagtgctgaattcatccccatgcgcggctttagcaattgtcatctgcaaaccatgctgccgcgtctgtttcgtcgtcaggtgaaattcaccccgtactggcagcggctggagttgcccgacggcgattttgtcgatcttgcgtggagtgaaaaccctgcacaggcgcaacataaacctcgtctggtggtgtttcacgggctggaaggcagtctcaacagcccttacgcccacggtctggttgaggcggcgcaaaagcgcggctggctgggcgtggtgatgcattttcgcggatgcagcggtgaaccaaaccgtatgcaccgcatttaccatagcggcgaaaccgaagacgccagttggtttttacgctggctgcaacgcgaatttggtcatgcgccaacggctgccgtcggctatagcctcggcggtaatatgctggcctgtttgctggcaaaggaaggcaatgatctcccggttgatgcggcggtgattgtctctgcgccgtttatgctggaagcctgtagctatcatatggaaaagggcttttcccgcgtttatcagcgttacttgctgaacctgttaaaagccaatgccgcgcgcaagctggcagcctaccccggaacgctgccgattaatctcgcgcagttaaaaagcgtacgtcgcatccgtgaatttgacgatctcatcaccgccagaattcacggctacgccgacgctatcgactattatcgtcagtgtagcgccatgccgatgctgaaccggatcgccaaaccgacgctgattattcacgccaaagacgatccgtttatggatcatcaggtgatcccgaaaccggaaagtctccccccgcaggtggagtatcaactgactgaacatggcggtcatgttggctttattggcggtacattacttcatccgcaaatgtggctggagagtcgcattcctgactggttaacaacgtatctggaggcgaaaagttgttgatattaacgtatctggaggcgaaatcatgttgattccgtggcaagacctctcccccgaaacgctggaaaatttaattgaaagctttgtgttacgtgaaggcaccgattatggtgaacatgagcgtacacttgaacagaaagtcgccgacgtcaaacgccagctacagtgcggagaagcggtgctggtatggagcgagctgcacgaaacggtcaatattatgccgcgcagtcagtttcgcgaataacctgcaaccgtcggcggacgagataataatgatagctaagtcatggagttactatgtctgccaaacatccggtcattgcggtaacaggatccagcggcgcggggaccaccaccaccagcctcgcgtttcgtaaaatattcgcgcagttaaatctgcatgcagctgaggtggaaggcgacagttttcaccgttacacccgcccggaaatggacatggcgatccgcaaagcgcgcgacgccgggcggcatatcagctacttcggccccgaggctaacgacttcggcctgctggaacaaaccttcattgaatacggtcagagcggcaaagggaaatctcgcaaatatctgcatacctacgacgaagccgtaccgtggaatcaggtaccggggacattcaccccctggcaacctttaccggaacccactgatgtactgttttatgaaggtttacacggcggcgtagtcacgccacagcataacgttgcgcagcatgtggacttactggtcggcgtggtgcctatcgttaaccttgagtggattcaaaaactgatccgcgacaccagcgagcgcgggcacagtcgagaagcagtgatggacagtgtagtgcgtagtatggaagactatatcaactacatcacaccgcagttttcccgcacccatcttaacttccagcgcgttcccaccgtcgacactagtaacccgttcgcggcaaaaggtatcccgagcctcgatgaaagctttgtggtgatccattttcgtaatctggaagggatcgatttcccctggctgctggcgatgttgcaaggcagtttcatttcccacatcaatacgttagtggtaccgggcggcaaaatgggtctggcaatggaattaattatgctgccgctggtgcaacgattgatggaaggaaagaaaatcgagtaactctgctattacgccggataaaatactatccggcttcacaacgggatagttaagtcacgcggcaaccacttcatagctgtgagtaatattcaccgctttttccagcatcaacgccacactacaatatttctcggcagagagatcaaccgcacgcgcaaccgctgcgtctttcaggtcgcgaccggtgacgataaaatgcagattaatgtgcgtaaacaggcgtggtgcctcttcgcggcgttcagaggtcaattttacttcacaatcgaccacatcctgacgccctttttgcaggatgctaaccacatcgatggcactgcaaccacccgccgccatcaacaccatttccatcggacttggtgctttatcgccactgttgccgtccattaaaatctgatgaccagaggcggattcgcccagaaaagttaacccttcgacccacttcactcgcgcttgcatttttgctactccactgcgtcaattttcctgacagagtacgcgtactaaccaaatcgcgcaacggaaggcgacctgggtcatgctgaagcgagacaccaggagacacaaagcgaaagctatgctaaaacagtcaggatgctacagtaatacattgatgtactgcatgtatgcaaaggacgtcacattaccgtgcagtacagttgatagccccttcccaggtagcgggaagcatatttcggcaatccagagacagcggcgttatctggctctggagaaagcttataacagaggataaccgcgcatggtgcttggcaaaccgcaaacagacccgactctcgaatggttcttgtctcattgccacattcataagtacccatccaagagcacgcttattcaccagggtgaaaaagcggaaacgctgtactacatcgttaaaggctctgtggcagtgctgatcaaagacgaagagggtaaagaaatgatcctctcctatctgaatcagggtgattttattggcgaactgggcctgtttgaagagggccaggaacgtagcgcatgggtacgtgcgaaaaccgcctgtgaagtggctgaaattagctacaaaaaatttcgccaattgattcaggtaaacccggacattctgatgcgtttgtctgcacagatggcgcgtcgtctgcaagtcactagtgagaaagtgggcaacctggcgttcctcgacgtgacgggccgcattgcacagactctgctgaatctggcaaaacaaccagacgctatgactcacccggacggtatgcaaatcaaaattacccgtcaggaaattggtcagattgtcggctgttctcgtgaaaccgtgggacgcattctgaagatgctggaagatcagaacctgatctccgcacacggtaaaaccatcgtcgtttacggcactcgttaatcccgtcggagtggcgcgttacctggtagcgcgccattttgtttcccccgatgtggcgcagactgatttatcaccccgatatcaactatgcacttcgacaaacgctggtgctatgtttgcccgtggccgttgggttaatgcttggcgaattacgattcggtctgctcttctccctcgttcctgcctgttgcaatattgcgggccttgatacgcctcataaacgttttttcaaacgcttaatcattggtgcgagcctgtttgccacctgtagcttgctgacacagctactactggcaaaagatgttcccctgccctttttgctgaccggattaacgctggtacttggcgtcactgctgagctggggccattgcacgcaaaattgcttcctgcaagcctgctcgccgccatttttaccctcagtttggcgggatacatgccggtctgggaaccgttgctcatctatgcgttgggcactctctggtacggattgtttaactggttttggttctggatctggcgcgaacaaccgctgcgcgagagtctaagtctgctgtaccgtgaactggcagattattgtgaagccaaatacagcctgcttacccagcacaccgaccctgaaaaagcgctgccgccgctgctggtgcgccagcaaaaagcggtcgatctaattacccagtgctatcagcaaatgcatatgctttccgcgcaaaataatactgactacaagcggatgctgcgtattttccaggaggcgctggatttacaggaacatattagcgtcagtttgcatcagccggaagaggtgcaaaagctggtcgagcgtagccatgcggaagaagttatccgctggaatgcgcaaaccgtcgccgctcgcctgcgcgtgctggctgatgacattctttaccatcgcctgccaacgcgttttacgatggaaaagcaaattggcgcactggaaaaaatcgcccgccagcatccggataatccggttgggcaattctgctactggcatttcagccgcatcgcccgcgtgctgcgcacccaaaaaccgctctatgcccgtgacttactggccgataaacagcggcgaatgccattacttccggcgctgaaaagttatctgagtctaaagtctccggcgctacgcaatgccggacgactcagtgtgatgttaagcgttgccagcctgatgggcaccgcgctgcatctgccgaagagctactggatcctgatgacggtattgctggtgacacaaaatggctatggcgcaacccgtctgaggattgtgaatcgctccgtgggaaccgtggtcgggttaatcattgcgggcgtggcgctgcactttaaaattcccgaaggttacaccctgacgttgatgctgattaccaccctcgccagctacctgatattgcgcaaaaactacggctgggcgacggtcggttttactattaccgcagtgtataccctgcaactattgtggttgaacggcgagcaatacatccttccgcgtcttatcgataccattattggttgtttaattgctttcggcggtactgtctggctgtggccgcagtggcagagcgggttattgcgtaaaaacgcccatgatgctttagaagcctatcaggaagcgattcgcttgattcttagcgaggatccgcaacctacgccactggcctggcagcgaatgcgggtaaatcaggcacataacactctgtataacagtttgaatcaggcgatgcaggaaccggcgtttaacagccattatctggcagatatgaaactgtgggtaacgcacagccagtttattgttgagcatattaatgccatgaccacgctggcgcgggaacaccgggcattgccacctgaactggcacaagagtatttacagtcttgtgaaatcgccattcagcgttgtcagcagcgactggagtatgacgaaccgggtagttctggcgatgccaatatcatggatgcgccggagatgcagccgcacgaaggcgcggcaggtacgctggagcagcatttacagcgggttattggtcatctgaacaccatgcacaccattagcagcatggcatggcgtcagcgaccgcatcacgggatttggctgagtcgcaagttgcgggatagcaaggcgtaatgcaggctaaaccatcggataaggcattcacgccgcatccgacatcttttgcctgatgcttcgtatttacgccccaaccaccttcgccaccgcgtgggcgaaacgttgcatcccttcatcgatatccgcatcttccaccaccaggctcggtgcaaaacgcatcacatccggtccggcattcagcaccattacgccagcctctgcgcccgcatacaggaaatcacgcgcccgacctttgtactgtggtttcagctctgcgccaatcaacagccccataccgcgaatatcgctaaatacatcgtactgctgatcgatcttctgcagatggtcaacaaaacgctggcgtttcgcctgaatgccttccagcacttcaggggtattgatgatatcaaacgccgcccccgctactgcacaggccagaggattaccgccgtaggtggaaccgtgagaaccaggatgaaacgcagaagcaatttccgccgtggtcagcatggcgctaatcgggaagccgccgcctaacgctttcgcagaggtcagaatatccggcgtaacgccgtagtgcatgtaagcaaacaaatcgccggtccgccccatcccgcactgcacttcatcaaacaccaataatgcctgatgttgatcgcacagctcgcgcaagccctgcaaaaactctggcgtcgctgccgtcacaccgccctcgccctggatcggctcaaccaccaccgcacaggtgtgatcatccatcaccgctttcactgcatggagatcgttaaagggaacgtggatgatgtctgccggtttcggcccaaagccgtcggaatattttggctgcccacccacgctaacggtaaacaggctgcgaccatgaaaagcgttatggaaggcaataattttggttttgaacgggctatgacgcacacaggcgtaatggcgtgccagtttaaaggcggtttcgttagcttccgtgccggagttcataaacaccacgcgttcggcaaacgttgcctcaatcagtttacgcccaagacgcagcgccggttcattggtgaaaacgttactgatatgccacagagtttcgccctgggtttttaacgcgttcaccagcgcaggatggcaatggcccaacgccgtaactgcaatgccacccgcgaaatcgacatactccttgccttgctgatcccagattcggctgccctgaccttttaccggaataaactctgccggagcataaatcggcaggatcacttcatcgaaagtcgcgcgtgtaattgctgtttgttcaattgccatctcatgatcaccctgttacgcataaacaaatgtgaaattataaccacaaaatatgcataaaaaatcactaaatggcaatcagaaatcagcgatgcaggaaattagccagcagttgatgtccttgttcgctaagaatactttctggatggaactgcacaccttccagatcccactggcgatggcgaatccccataatctctcgggtttcgctccaggccgtcacgtcaaagcacgctggtaaactgtcaggttccaccaccaggctatggtagcgtgtcacggtaagtggatttgccagcccccgaaatacgccctcaccgttatgtgtaatcgggctggttttgccgtgcatgacctttgcggcgcgcacaactttaccgccaaatgcctgcgccattgcctgatgaccgaggcagacgccaagaatcggcaagcgcccggcatagtggcgaataacgtcaagggagatcccggcttcatctggcgtacaggggccaggactgatgacaattttttgtggtttaagggcgtcgatatccgccagcgtcaacgcatcgttgcgcttaaccagcacatccgcccccagttcacaaaagtactggtagaggttccaggtaaaagaatcgtagttatctataagcaggatcatggcggctccggtacaaaagaaccgcgctattttactcagattccccggcttcgcttaccactttgctaaatatcatctgcagtgcggtgagatcccccattgccccactctgatttgcctgattccaggcctctttttcgataccctgccagctcagttgatatccggcatgaatcgccagttgctcgaagaagatccgctgtgccagaccacttcccacccggaagggatgcagcacgttgatttcacaatagtaatgcgccagccgctcgacgaacttcgctttctccaggccaaccagataaccttcttcctccagatcctgcatcagggcattgccctctttttcgatataagcaaagtggcagaacggcgtatcaccctgataaatatcaacttcacgcagttgccctgcccagtcgaaaatatcctgatacagctggcgatggatagttcgcaaatgcggtaaaccgcgcaccagcggaccaagctcaatggtcgcagcacgcagcgccgtcatttcgtaagcggcctgttccagccgctgctgctggcggatgttcagccggttacgcatgatatcaaggcctggataaagatacggatcgcgcccttcgccgaatttatcgctcatagtgactcctcagctcttcaaggcgcgctaaagcctctgcggcagtaagagtgactaaaggcatctcgacgccttcaagacggcgactggcctgaaaattacgattacgctgaagctcccagagacgggacttttgcttatcggtgagtttcttcacttgatgcctccctgaacgtgtccatttgccacaagtataagcggcaaatccgggttacgccgggagagcagaagcgcgggcaagattgcccgcgcgagaaatcattacggcaggactttagcggaaaggataactaccggtttactcggcacattctggtacggaccaacgtcatgagtcggcacctgggaaatcttatcggcaacgtccatgcctttcaccactttaccaaataccgcgtaaccgaaatcacgctgaccatggtcaaggaaggcgttatcggcaacgttgataaagaactggctggtggcgctgtctttgtcagcggtacgtgccatcgcgatggtgccacgcgtgttgcgcaggccgttatcggcttcatttttgattggcgggtttggttttttctgctgcatctgctcggtgaaaccgccgccctgaatcataaagccaggaatgacgcggtgaaaggtagtgttgttataaaaaccgctgttcacataatcgacaaagttttgcacagacactggcgctttttgtttatccagctccagttcgatgttaccagcactggttgtcaacaatacgtgcgggtcccctttcgctgccattgctgcgggagaaagagcagaaagagcgaaaacagcagccatcgccgccagggtgcttttgaacatgagatttccttaacaaacagagcagaaaaaaagcaagtgaagagattctaaatagccttcaagaacaaggccatccctttacctaattttacgtatctgaaatatatgtaacctgacgatcactttttattccgtgatcaaaatcacctcttaaaatgcaatttagcaaccgattgcaataaaacatttaaacagatcacaaaatcacctaaaatcgcccgctcgcggcatatcccgctatgccattttatttttgaacgcaggccaatcatgactaacagcaatcgcatcaagctcacatggattagctttctctcctacgcactgactggtgcgttggttattgtcaccgggatggtgatgggaaatatcgccgattatttcaatctgcctgtttccagtatgagtaataccttcaccttcctcaacgccggcattttaatctctatcttcctcaacgcctggctgatggaaatcgtcccgttgaaaacgcagttacgttttggctttctcctgatggtgctggcggttgccggtttgatgttcagccacagcctggcgctgttcagcgcggcgatgttcattctcggggtggtcagcggcatcaccatgagcattggtacattcctggtaacacaaatgtatgaagggcgtcagcgcggttcccgcctgttatttaccgactccttcttcagtatggctgggatgattttcccaatgatcgccgcgtttctactggcgcgcagcattgagtggtactgggtttatgcctgcatcgggctggtgtatgtcgctatttttattctgaccttcggctgtgagttcccggcgctgggcaaacatgcgccaaaaacggatgctccggtagagaaagaaaagtgggggatcggcgtactgtttctctctgttgcggcgttgtgctacatcctcggtcagttaggttttatctcctgggtgcctgagtatgccaaaggcctgggcatgagcctgaacgacgcgggcacgctggtgagtaacttctggatgagttacatggtcggcatgtgggcgttcagctttattcttcgcttctttgatttgcaacgcattctgaccgtactggctggtctggctgcgattctgatgtacgtctttaacaccggaacaccagcacatatggcgtggagtattctcgctctgggcttcttctccagcgcgatctataccaccatcatcaccctgggtagtcagcagaccaaagtaccgagcccaaaactggttaactttgtcctgacctgcggaaccatcggtactatgttgacctttgtggttaccggcccgatcgttgaacatagcggtccgcaggcggcactgcttacagcaaacggtctgtacgctgtcgtctttgtgatgtgcttcctgttaggtttcgtcagccgtcaccgtcagcataacaccctgacctctcattaattgctcatgccggacggcactatcgtcgtccggccttttcctctcttcccccgctacgtgcatctatttctataaacccgctcattttgtctattttttgcacaaacatgaaatatcagacaattccgtgacttaagaaaatttatacaaatcagcaatatacccattaaggagtatataaaggtgaatttgatttacatcaataagcggggttgctgaatcgttaaggtaggcggtaatagaaaagaaatcgaggcaaaaatgagcaaagtcagactcgcaattatcggtaacggtatggtcggccatcgctttatcgaagatcttcttgataaatctgatgcggccaactttgatattaccgttttctgtgaagaaccgcgcatcgcttatgaccgcgtacacctcagctcttacttctctcaccacaccgccgaagagctgagcctggtgcgcgaaggcttctacgagaaacacggcatcaaagttctggtcggcgaacgcgctatcaccatcaaccgtcaggagaaggtgattcactccagcgccggacgtaccgttttttatgacaagctgatcatggcaaccggttcctacccgtggatcccgccaatcaaaggttctgatactcaggactgctttgtctatcgcactattgaagacctcaacgccattgaatcctgcgcccgtcgcagcaaacgcggtgccgttgttggtggcggcctgttaggtctggaagccgcaggcgcgctgaaaaacttaggtattgaaacccacgttatcgaatttgcccctatgctgatggcagaacagcttgatcagatgggcggcgagcagctgcgtcgcaaaatcgaaagtatgggcgtgcgcgttcacaccagcaaaaacacccttgagattgtgcaggaaggtgttgaagcgcgtaaaaccatgcgttttgccgacggcagcgaactggaagtcgactttatcgtcttctctaccggtatccgtccgcgcgataagctggcaacccagtgtggtctggacgttgctccgcgtgggggtattgtcattaatgattcctgccagacttccgatccggatatctacgccatcggtgaatgcgcaagctggaacaaccgtgtatttggtctggtagcacctggctacaaaatggcgcaggtcgccgttgaccatattctcggtagcgaaaacgcctttgaaggtgctgaccttagcgccaagctgaaactgctgggcgtagacgtaggcggtattggtgatgcgcacggtcgcacgcctggcgcacgtagctacgtttacctcgacgaaagtaaagagatctacaaacgcctgattgtcagcgaagacaacaaaaccctgctcggtgcggtactggtgggcgataccagcgactacggtaacctgctgcaactggtgctgaacgctatcgaactgccggaaaacccggattccctgatcctgccagcacacagcggtagcggcaagccgtctatcggtgttgataaactgccggacagcgcgcaaatctgctcctgcttcgacgtcaccaaaggtgatctgattgctgccatcaacaaaggctgccacacagttgcggcgctgaaagctgaaaccaaagcgggtactggctgcggtggctgtatcccgctggtcactcaggtactgaacgcggaactggcgaaacagggcatcgaagttaacaacaacctgtgcgaacactttgcttatagccgtcaggaactgttccatttgatccgcgttgaaggcattaaaaccttcgaagaactgctggcgaaacacggcaaaggctacggttgtgaagtttgtaaaccaaccgtcggtagcctgctggcctcctgctggaacgaatacattctgaagccggaacatactccgctgcaggattctaacgacaacttcctcgctaacatccagaaagacggcacctacagcgtgatcccgcgttctccgggcggtgaaatcaccccggaagggctgatggcggtaggtcgtatcgcgcgtgaatttaatctctacaccaagatcactggctcccagcgtctggcgatgtttggcgcacagaaagacgatctgccggagatctggcgtcagctgattgaagccggcttcgaaaccggtcatgcctatgcgaaagcactgcgtatggcgaaaacctgcgtgggtagcacctggtgccgctacggcgttggcgacagcgtcggcctcggcgtggaactggaaaaccgctacaaaggcatccgtacgccgcacaaaatgaagttcggtgtctccggctgtacccgtgaatgtagtgaagctcagggtaaagacgtgggtattatcgccactgaaaaaggctggaacctgtatgtttgcggtaacggcggcatgaaaccgcgtcatgcggatctgctggcggcggatatcgatcgcgaaacgctgatcaaatatctcgaccgcttcatgatgttctacatccgtactgccgacaaactgacgcgtaccgcaccgtggttagaaaacctcgaaggcggcatcgattacctgaaagcagtgatcattgacgacaaactggggctgaacgcacatctggaagaagagatggcgcgcctgcgtgaagcggtactgtgtgagtggactgaaacggtcaatacgccgtctgcgcagactcgcttcaaacacttcatcaacagcgacaagcgtgacccgaacgtgcagatggtgccagagcgcgaacagcaccgtccggcaacgccgtatgaacgtatcccagtaactctggtggaggacaacgcatgagccagtggaaagacatctgcaaaatcgatgacatcctgcctgaaaccggcgtctgcgcgctgttaggtgacgagcaggtcgcgattttccgcccgtatcacagcgatcaggtgtttgcgatcagcaacatcgacccgttcttcgagtccagcgtgctgagtcgcggactgattgcggaacaccagggcgagctgtgggtcgccagcccgctgaaaaaacagcgttttcgcttaagcgacggcttgtgcatggaagacgaacagttttccgtcaaacattacgaagcgcgagtgaaagacggcgtggtgcagctgcgcggttaatgttttaacgggaggcgcaatgcctcccctttttgcatggtcctgtaataatcttcggtatattgcaggacattttttaaactttttgttttattttttgtttttattttttaaaggataatcaaatgtttacagacactattaataagtgtgcggctaacgctgcgcgcattgcacgcctgagcgcaaataacccgctcggcttttgggtcagctccgccatggcgggcgcgtatgtgggtcttgggatcatcctgattttcacgctcggtaatttgctcgatccatccgtacgccctttggtgatgggcgcgacctttggtatcgccttaacgctggtgattatcgccggttctgaactgttcaccggacacaccatgttcctcacctttggggtaaaagcgggcagcatcagccacgggcaaatgtgggcaatcctgccgcaaacctggctgggtaacctggtcggttccgtcttcgttgccatgctctatagctggggcggcggtagcctgctgccggtagataccagcatcgttcactccgtcgcgctggctaaaaccactgcaccggcaatggtactcttcttcaaaggtgcattgtgtaactggctggtttgcctggcaatctggatggcgctgcgcactgaaggggcggcgaaatttatcgctatctggtggtgtctgctggcatttatcgcgtccggctacgagcactctatcgctaacatgacgctgttcgcgctctcctggttcggcaaccacagcgaagcctacacgctggcgggtattggtcataacctgctgtgggtgacgctgggtaatactttaagtggtgccgtattcatgggattgggttattggtatgctacgccgaaagcgaatcgtccggttgcggacaaatttaatcaaactgaaacggctgccggttaattactaaggggtttttacgtggatcatttgcctatattttgccaattacgcgatcgcgactgtctgattgtcggcggtggtgatgtcgcggaacgcaaagcaaggttgctgttagacgcaggcgctcgcttaacggtgaatgcattagcgtttattccacagttcaccgcatgggcagatgcaggcatgttaaccctcgtcgaagggccatttgatgaaagccttctcgacacctgctggctggcgattgcagcgacggatgatgacgcgcttaaccagcgcgtcagcgaagccgctgaagctcgtcgcatcttctgtaacgtggtcgatgcgccgaaagccgccagctttattatgccgagcattattgaccgcagtccgctcatggtagcggtctcctctggcggcacctctccggttctggcacgcctgttgcgcgaaaaacttgaaagtctgctgccgttacatctgggccaggtagcgaaatacgccgggcaattacgcgggcgagtgaaacaacagttcgccacgatgggtgagcgtcgccgtttctgggagaaattgttcgttaacgaccgcctggcgcagagcctggcaaacaacgatcagaaagccattactgaaacgaccgaacagttaatcaacgaaccgctcgaccatcgcggtgaagtggtgctggttggtgcaggtccgggcgatgccgggctgctgacactgaaaggactgcaacaaattcagcaggcagatgtggtggtctacgaccgtctggtttctgacgatattatgaatctggtacgccgcgatgcggaccgtgttttcgtcggcaaacgcgcgggataccactgcgtaccccaggaagagattaaccagatcctgctgcgggaagcgcaaaaaggcaaacgcgtggtgcggctgaaaggtggcgatccgtttatttttggccgtggtggcgaagagctggaaacactgtgcaacgcgggtattccgttcagcgtggttccgggtattaccgcagcttctggttgctctgcctatagcggtattccactcacgcatcgcgattatgcccagagcgtacgcttaattaccggacacttaaaaaccggtggcgagctggactgggaaaacctggcggcagaaaaacagacgctggtgttctatatggggttgaatcaggccgcgactattcagcaaaagctgattgaacacggaatgccaggcgaaatgccggtggcaattgtcgaaaacggtacggcagtcacgcagcgcgtgattgacggtacgctcacacagctgggagaactggcgcagcaaatgaacagtccaagcctaattattattggtcgggttgttggcctgcgcgataaactgaactggttctccaaccattaatttaacccgggccagagaattctggccttcttaatgactctttttatatattcagcaaataaaacatagccccttaataaatattatctgctaatgggttatattcaccgttacagcgacttacaaaattaagtcattcgctcactgacgccaattaaatattcctgtatcgttcttaacgagcagtctgcttatattcatataatcaatgaatattaattaatatataatacatagggaatgtaaatgaacaaatttattaaagttgcactggtaggtgcagtactggctacgttaactgcatgtactggtcatattgaaaaccgtgataagaactgctcttacgactacctgctgcacccggcaatttctatttctaaaatcattggcggttgcggtcctactgcacagtaagtctctgacagaaatcggctaacaccggtttaattgcccgacgccctctggattttccgagggcgtatttgtttctatgtccttcttgcccccgcccgtaaaaatattttcactttaaattcaatttgataactacatccattagccacagcgcgatcctgtgcgaaattttgtgatcttcctccacattacataacatcatatgttgttatattcatcatgcattgtcatgttaccttttaaatgactgcaaactctcccctacaacgtattggacaagaaaaaggtatcgctatgggaagccaggaactccaacgcaagctcggattttgggccgttcttgcaatcgccgtcgggacaaccgtcggctccggtatttttgtatctgtgggtgaagtggcaaaagcagcgggcacgccgtggcttacggtgctcgcgtttgtcattggcgggttaattgtgatcccgcaaatgtgcgtctatgcggaactatccaccgcttatccggaaaatggcgcagattatgtttatctgaaaaatgccggaagccgaccgctggctttcctctccggctgggccagcttctgggccaacgatgcgccgagtttgagcattatggcgctggcgattgtcagcaatcttggctttttaacgcctatcgatccgttgctcggtaaatttatcgccgccggattaattatcgcctttatgttgctacacctgcgctccgttgaaggcggcgcagcgtttcagacgctaattaccatcgccaaaattatcccgttcactatcgtcattggccttgggatcttctggtttaaagcggagaattttgccgcccctaccaccactgcgattggcgcaacgggcagctttatggcgctgctggcggggatctctgccaccagttggagctataccggcatggcctctatctgttatatgaccggcgaaattaaaaaccccggaaaaaccatgccacgagcgctgattggttcctgtctgctggttctggtgctctacaccctgctggcgctggtgatttccggcctgatgcccttcgacaaactcgccaattctgaaacgccgatttccgacgccctgacctggatccccgcactcggcagcaccgctgggatctttgttgccatcacggcgatgatcgtcattcttggtagcctttccagctgcgtgatgtaccagccgcggctggaatacgcgatggcgaaagacaacctgttctttaaatgcttcggccatgtgcatccgaaatacaacacgccggatgtctccatcatcctgcaaggggcgctggggatcttcttcatcttcgtttccgatctcaccagcctgctgggttatttcaccctggtgatgtgtttcaaaaataccctcaccttcggctccatcatctggtgtcgtaaacgcgacgattacaaaccgctgtggcgtactccggctttcgggctgatgaccaccctcgccattgcgagtagcctcattctggtcgccagtacctttgtctgggcaccgattcccggccttatctgcgccgtcatcgttattgctactggtctgcctgcttacgccttctgggcgaagcgtagccgccagctcaacgctttgagctaatgttatctggagaaaataaaatgttggatattgataaaagcaccgtggactttctggtcaccgaaaatatggttcaggaagtggaaaaagttctcagccatgacgttccgctggtgcacgccatcgtggaagagatggtgaagcgcgacattgatcgtatttatttcgttgcctgcggaagcccactcaacgcggcgcaaacggcgaaacatctggcggatcgcttttccgatcttcaggtctacgccatttccggctgggagttctgcgataacaccccgtatcgcctcgacgatcgttgcgcagtaattggcgtttctgactacggtaaaaccgaagaggtaatcaaagcgctggagctgggccgggcctgcggcgcactcactgcggcgttcaccaaacgcgcggatagcccgattaccagcgcggcggaatttagcattgattatcaggccgactgtatctgggaaattcacctgctgctctgctacagcgtggtgctggagatgatcacccgcctcgcgccgaacgcggaaatcggcaagatcaaaaacgatctcaagcagttgccgaatgcgctcggtcatctggtacgcacctgggaagaaaaaggccgccagcttggtgaactggccagccagtggccgatgatttataccgttgctgcgggtccgctgcgtccgctgggttacaaagaaggcattgtaacgctgatggaatttacctggacgcacggctgcgtgattgagagcggagagttccgccatggcccgctggagattgtcgaaccgggcgttccgttcctgttcctgctcggcaatgatgaaagtcgccacaccaccgaacgcgccattaactttgttaaacagcgtactgacaacgtgatcgtcatcgattacgccgaaattagccaagggctgcacccgtggctggcaccgttcctgatgttcgtgccaatggagtggctctgctactacctgtctatttacaaagatcacaacccggatgaacgccgctattacggtggtctggtggaatattaatccctctcccggcccggcaacgggccggatttacgcaaggagttacccgatgaaaacaggtatgtttacctgcggccaccagcggctgcctattgaacacgcatttcgtgatgcaagcgagctgggttacgacggcatcgaaatttggggcggtcgcccgcacgcgttcgcgccggacttaaaagcgggcggcatcaaacaaatcaaggcgctggcgcagacgtatcagatgccgattatcggctatacgccagaaaccaacggctatccgtataacatgatgctgggcgatgaacatatgcgtcgcgaaagcctcgacatgatcaagctggcgatggatatggcaaaagagatgaacgcgggttatacgctgatttccgcggcccacgcgggctatctcacgccacctaatgttatctggggacggctggcagagaacctaagcgaactgtgtgagtacgcggaaaacatcggcatggatctaatcctcgaaccgttaacgccgtatgaaagcaacgtcgtgtgtaatgctaatgatgtgcttcatgcgctggcgctggtgcctagcccgcgcctgttcagcatggtcgacatttgcgcgccgtatgtccaggcggaaccggtgatgagttatttcgacaaactgggcgataaattacgtcatctgcatattgtcgacagcgacggggccagcgacacgcattacattcctggagaaggcaaaatgccgctgcgggaactgatgcgcgatattattgagcggggctatgagggttactgtacggtggagctggtgacgatgtatatgaacgagcccagactctatgcccgccaggcgctggaacgctttcgcgcgctgctgccggaggatgagagatgaaaaccctggcgacaatcggcgataactgcgtcgatatctacccgcaactgaataaagcgttttctggcggtaatgcggtcaatgtggcggtgtactgcactcgctacggcatacagccgggatgcattacctgggtgggtgacgatgactacggcacaaagctgaagcaggatctcgcccgcatgggcgtcgatatcagccatgtccatacgaaacacggcgttaccgcacaaactcaggtggaactgcacgacaatgatcgcgtttttggcgactacaccgaaggcgtgatggccgactttgccctgagtgaagaggattacgcctggctggcgcagtatgacattgtgcacgcggcaatctggggacatgcggaagacgcattcccacagctgcacgctgcgggcaaacttaccgctttcgacttctccgacaagtgggacagcccgctctggcagacactggtgccgcatctcgattttgcctttgcctccgcaccgcaagaagacgaaacgctgcgtctgaagatgaaagcgattgttgcccgtggcgcaggaacagtgattgtcacgctgggtgaaaacggcagcattgcctgggatggcgcgcagttctggcgtcaggctcctgaaccggtgacggttatcgacaccatgggtgccggagatagcttcattgccggattcctttgcggctggtctgcggggatgacattaccgcaggcgatagcgcagggaacggcgtgcgcggcgaaaaccattcagtaccacggtgcctggtaagtataacgttggcgtgagcatcttcacgccaacgtgctgttacttgccggaaaacgaccctataatccgagtaattcattctttatttcagggtcgattatgagtgctacggaccgctactctcatcaactcctctacgctaccgtccgccagcgactgctggatgatatcgcgcagggggtttaccaggccgggcaacagatccctaccgaaaacgagctttgtacacaatataacgtcagccgcattaccattcgcaaagccatcagcgacttagtggcagacggcgtactgatccgctggcagggaaaaggcacctttgtacaaagccagaaagttgaaaacgccctgcttactgtcagtggttttaccgattttggcgtcagtcaaggcaaggcgacgaaagagaaagtgatcgaacaggaacgggtcagcgccgcgccgttttgcgaaaagctgaacatccccggaaacagcgaagtgttccatctctgccgggtgatgtatctcgataaagagccgctgtttattgatagtagttggatcccgctgagccgttatcctgactttgatgagatttacgtcgaaggaagctccacctatcagttatttcaggagcgttttgacacgcgagtggtcagcgacaaaaagaccatcgatatctttgccgccacccgcccgcaggcaaaatggctgaaatgcgaactgggcgaaccgttgtttcgcatcagcaaaatcgcctttgatcagaatgacaaaccggtgcacgtctccgaactcttctgccgcgccaatcgcatcaccttaactattgataataaaagacattaaccgtaggccggataagatgcgccagcatcgcatccggcgatgctggcgcgttgaattttacatcccgtacgttcccctcaccctaaccctctccccaaaggggcgaggggaccgttcagtacggaatttagcttgacggtgctatccagcattaaatactggcaatactctcacgcaaaatccgcagcaccgtctcttcaccgctgcgattcgggttaatgcgaatcgcacaatgttcactttgtggattcgcctggcgaaacgttccggaaaggcgataaaagagcggcgggatttcatatttgctctctgcacccaccgggtaaggcaaggcaccgcgcttttgcgcctcttccagcactctggcggcaatcggctgatgaaactcgacaatcaacaccttgctctgcgcattagcaatcaccgcgcttttcacttccggcaccgcaccaccgttaagcaaagccagcaaccgttcagatacccctgcctgcaccgcgtgcatcactggcgcaaacaccagaccacgcaatacttccagcgcctgtgcgccctggatctggctaccgccggagtaaagcgtggcgcgaatacggttgataacatcagcatcgccgaccactgcaccaacaccctctggcccaaatagcttgaagcaggaaaatgtgctgacattcgcgccgcattcacagccgattcgagccaccttcatcaccgcatagttgtcatcggttaacgctggaacacctgccgcgcgcaacgttgccagcacatctgccagcacgtagctgtcctgcggctgctggcgcgtatgctgcaccagcgccgcatccggttgttgctcgtcgacgacctgcttcagtgcgctcaggtcattgaaatcaacagtaataagcgtcagccccatctgctcaataataacccgtgtcgtcgggtaaacaggcgcgtcatgcaccagaagacgctgccccggtttgagcaaagccgccagcccggcgcgaatcgcgccagtccccgcgtcctgcaccagcgccgcagcctgtgcgtgaaatgcatcagccagcacctgttccacacgctgggtaacgcgcggttgattcagtcctggcgttaagcctaaatcaccgccagtaagaaactcgctgccggggaaatggcgacaaatgctatccaccagcgcaaactgcttttgctgcgcctcaataatcgtcaggctttgcagaggaaacgtcttcataggtgccttccttaagccggaacgaacaggccaagccagtaaagaacattcagcagaataccggtgatcattactgccacgaccggtgccgccattttctgtaccggacggcccagggattcgttgaggaagtaaatggcaaccgcgatagagaatccggtataacccgccatcttaattgctgcgaaaatgctaccgaccagcagcgccacttccatcagcatattcatggcgttacggatgttatcgctcgcattacgcacgctcgggtagcgtcccagccatttgccgatgctacgaagcagcaagacttccgcgctaataaccactgcgcctaataccgctgcaaccatcggattcgggctgagatagtccaccgcataaacaaaggtaaagcccgcaactgcatacacacccgttgctaacgcggtggtggcaatcaacggcacaaaccccagtccgcgcataaattctgccagagccgcctgattaatcagcgtttggctttgttccggcgttacgcctgcggaatatgctttctccagtgtgaagatgctcacttcactgccagcaaaaatcttcatgctggcaacggcggcaatcaatgctcccacgatggcgatatagggtaagtttttgataatccgactcgtgcgttcttcaaacacgctaagcccgctggcatcaatgtcattttcatcacgatgacgcaggtcgtgagttatcgcgatccccagcagcatcaccatgccaataaagatttcgatggattcagggttaagatgtgggaaatagcgcacgactaccacacgggtcatcagtaccaccacggcggcgatcagactttgcttccagccaaactggtagaaaatcgccaccagcgggaacagtgcaaaagcactaaccaccgggctgcttaattcccccaggctacctaatacatccaccggcagcgcggtcagcagctggtttactggcaacaggcaagtaaggatcaacacgccccagatagcgccaagaccaaacgccatcaggctgtttatcgccaggacgccgaggatatcggtaggaagaaagagtaaccatgcgttgagcagcccggttttcagggtaaaagagatccccacgctggccacaaaaccaatgctcagaccaaaagcgatactccccgcctcgcgacggttcatatagccttcaatcagttgcggcaggatcgggcggatgccgtcatgaaaaacagccgcgctgcgatgcgccagaaggcttgtcatacccgtcaggcacgccaccacgataatctgaatatacagatccatagtcgtgccttttatttcagatggttaatcagcatcggaatcgcgtgttcgacgtgctcaacggaaaggccaaacgccacttttccttcagcgatcattttggcgatatgctcgtctttcgctttaatgcctggtttggcaatggtgcaacttttgttatagcctatcaccgcgatggcaatgctcaatgccgcgcccgcaccggtattacacgcgccgatgtaataatccagttgcccggatttcaccttcattgccgcttccatgtcgttgtgaatgaaaacttcaaaacagccaggagccgtcgcttcaatagtttttttaatctgctcacgctgtaagcctgcaacgccaatctttttcatgagtctgtccttattggaaaaattgagagggattttcacgtaacatcacatccacatcggcctgactgaatccactctggcgcaattgcggaataaaggtggttagtaaatagtcatagccataaccaccgttggcttttaaatgggagcggcgcgtaatatccatgctcagcatgacgcggttcagcaacccacggtcgcgtagcgcatgaagcatcgcaatacgcttttcgtccgggtagtaactgttcttgccgatggtgtcgaactgcacgtacgcgccgagatcgatcatcttcaaaatgttgtcgaggttgtctttcagatcgcagtgaccaacggtgacgcggctaagatcaaccccgtgggcttgtagcaacgccagttgctccagccccatcgtgctgaagctcgtatgcgtggagatcgggcgtccggtctggttatgcgccagcgcagcggcaataaataccttctcttccagcggcgtaatctttccttcgctggtgccgatctccgcgatgatcccggctttcagctccgtgccatcgataccctgttcaatttcatcgaccatctcctgcgccagttcctgcacgctgcgggtcgccacatgttccgggaaaaacgcgtcctggtaataaccggtacaggccaccacgttgatccccgtctcgcgcattacatcaagcataaattgcgcattgcgccccatgtaacggttggtcatctcaatcacattacgcacgccccgggtcatcaggtcgttcatctcctggcaaatgaacgcatactgatcaaggcggcagtccacgttgtttttaaagccggagagatcaatatgcagatgctcatgggcgagggtgtaacccgtcggatcaaaactcatagggtgtctcctgcaaaccggagggaggaaagaaaagagcgaccattttgtggcggtggcgcgcggaaaaattcacacacggtagcccccacatcagaaagcgtggtgcgcacaccgagctgcgtagcgatcatcccttgctgataaaccagcactggcaccacttcgcgggtatggtggctgtgaccaatggtcggatcgttgccgtgatccgccatcacgaccaggcaatcatctggctgcatcgcctcaacaagccgggcaaggttacggtcaacgacctgcaaacgttcggcataacgtgcgacgtcttctgcatgaccagcgaggtcggtttcctgaatgttggtgcaaataaacgccgtcggatgggtgttaaattcgttgagggtgatatccataatccgctggctatccaccagattttgccagctcacgccataaggattgttgacgatatctgccaccttacccaccagcacggttggcacgcctgcttcatacagtttttgtggcacctgcactttttcatcgacgccatagcccatatgcacgacctggaaaccgttgtcataagcgccagaacgcggcgcattgataccaataaagcgcccttctttgctttctgcggcatcgagaatgcgttgactgtcggttaacaggccaccaaatgtaatgacccgaccgacctgtacctgctcacgcacgatacgaccaattttgattgcgtcgtcaaaagagatcacagagagattggcggtaatgttatagacctggcctaaatccgcctcgagattatcgccaatcgcaaccgcctgattgacccacagaaattgcagatcatcgccacggcgctccacctgccagccagcggaaactaatgcctgctcaacacggtcaatcacatcgcgaaaaggcatccgcagcggcggtaacgggcgcgtgcctaaaatttcctgatgccccataaaggtatcgccaccttcatgttgcagctctgccacgccccaggttgcggaatcactcggctgcatatcgcctggcgcataacccaatgcgttgattagccccagcgtctccagcgttggtagctgcaaatgcggcaactggctcaggatgtgaccacatgtattcgctcccgcatcttgcggacgcaccagcgtgacatctttcattgcccctacgccaaagctatcaatcactaacaccacaaatcgcgccattacgcccccagagagtttccaagactgtcataacgaccgacgatttccggttcgccacgatgaataccggacaccagcaccacatcgctacgggtgacaaaaatctgcgtgcgaaaacagagcaccactgcactgcttaccggaaactcgcctgccagcggcagggtgtagtcgatactgctgtcatccacagttttgagattggtttcagtaatcttttgattttctggcgtaaacaccaacgcatgttgcgcatgaccacgacgatagtaaccgccgccgtagcagtagctgtcgccacggaaatgatgggagatttcacttaaccagagcatcgcgatacgttcaggctgatcgccctgctggtttgccggaatagtgcccgtcagcgcatgaccgggttcggcatgagtcacaccgtattgcgccagtaatggcaggctagtgcagctggtcgcactaggcgcgttcagttgctcaagtgcaataccagatttcgccagttgatcccgtgcctgtatcagcgtgtgaagattcggtgtcggcaaaacttttccgacagcctcatcccaaagcaggcaagggaaatgggtaagtccggctaaatgcagccctggcagattctggatttcggcgacaatctccggcaacaccttgagggcaaaaccgctctcctggcccggataaagaaaatcatcgtcgctataaactttaagcagcacagactggattcgcccggccttcaccgccgccgcagaaacttcccgcgctttgtcgagagtaaacacggtgatgacgtcggtgccctgttcaacggcgtcagcaacctgatgacaagggatttgtaccagatgcccctgatgcgccacaggcaaaccagcgcggcgcatgactcgcgcctctttgtaatccaccgccacaatgccgctgtagcctaatgccagcaatttttccgccagccacggattacgaccaaactgcttggtcatcagatacagttcaatgccgtaaagccgcgccgtctcaatcagccgcttaccgttttccagtatctgatccacgtcgatcacccagctgtccggggcgatcttgccctgctgccacaggcttagtgcggcggaaatcagcgccgggttctggcgtttcaatgcttctacaaacatcttgttgcctcgtttctgttccttgaattaaatattcatttttttgaatatttaggttgtgcgacgtggatttgtcgggagcttcaaacctcttcgttagcagccatccataatccataaaggttggccagcaaatagccttcttcacacgggttaacttccagtgcgaattccttcaacaacacctgatgcaattgcacaacggcttgccagtggctggattgcgccagttctgccagcaactcgttatccagcggctctatttcttcaccacggcgactgcgcatcagtgcactcgccatatgtgtcatcgccatcgttccttgctcactgcgcaccggcagatggcactctgtttccagtacgttgacgacctgcatcatgcctttgcagatgtccttatcaataacgcctgcctcgcaaagcaggttgagtctggtttccatatcagatgcctttcgtttaataactcggttcctgttccccactcactacccgttgttgatgggcgagcagggcgtgtttatctacaacggcacgcagcagttgttgcattgggtaatcatcgactcgcgtcaggaccacggcttcggtggcctgtaaaaatcgcggatcgtctgtgagcggcgtcgcctctaatcccagcatggtcagttcgttttccgccaccacgttccagatcaccgcatcgacatcgcctttaacaatgcgttgtaaactctcgtgataagagagatcgactcgttccacatcactaccgccaaaaaaaacatcggtcatgattttctgatccgcgctacggttatccagccccacgcgcttcacgtttgcggactcgcctttacggcaaatcaactggtgctcgccaacgtaggtgtgcggccccaactccagcgcgaggcataagcctttttgcgtgagataactttccgccgctagtcggctaaccaccgccatgtcatacacgccattaagcagacactccacgcgaatatccgcgccacgcatgtgcgcatagtaaaaaggaatgccatcaaactgggctttcaatccgctcgccaggccttcgtacaaacgggtatagggcaagggcattgcacataccacgttgttgatatccacatgagtcagcaatgctttgttatccatctcgaccagataactgccattgcgcccacggcgttcaatccgtatcgctccgctactttccagcgttttcaacgcggcctgcgtcaggccaacggaactacggcattcatttgccagctcatctatggttttcaatcgattaccgcacttttcacccaacaaataacgggccagcgtcgtgatgacgacgccttcttttttgataaacgttcgacgcataataaattttcagtaaattgaatatttatatcttcaggaatttgaagataaggcgcaacagcgagatgtggaaacggcgaggcacttcacattttttcggattattgcaaatgaggataaaaaaaccgggtttccccggtttcagagtgatgataaaagcaaaattgcctgatgcgctacgcttatcaggcctacatttccttgcaatatgtgcattactttgtaggccggataaggcgttcacgccgcatccggcatgaacaaagcgcaatttgccagcaatagtgaattacggcttcgccacaaaaccaatcgcttcgtacaccgcttttagcgtacgggaagcgtgcgcgctggctttttccgcgccatctttcatcacctgttgcaggaaggcttcatcgttgcggaaacggtgatagcgttcctgcaattcagtcagcataccggaaacggcatcagccacttcacctttcagatgaccatacatcttgccttcgaactgtttttccagttctgggatgctctggcccgttaccgcactaaggatatccaacaggttggaaacgcccgctttgttctgcacatcgtagcgaactaccggcggctcgtcggagtcagtgaccgcacgtttgattttcttcactacgcttttcgggtcttccagcaggccgataacgttattgcgattatcgtcagacttggacatcttcttggtcggctccagcaggctcattacgcgcgcgccagatttcggaataaacggctccggcaccttaaagatctcgccatacagcgcgttgaaacgctgggcaatatcgcggctcagttcgaggtgctgtttctggtcttcacccaccggtaccagattagtttgatacagcaggatgtccgctgccatcagcaccggatagtcaaacagaccagcgttgatgttctcggcataacgcgcagatttatctttaaactgcgtcatgcgactcagttcgccgaagtaggtatagcagttcagtgcccagcctaactgtgcatgttccggcacgtgggactgaacaaaaatggtgcttttctcaggatcgataccacaagccagatacaaggccagcgtatccagcgtcgctttacgcagcttctgtgcatcctggcgcacggtgatcgcgtgttggtcaacgatacagtaaatgcaatggtagtcatcctgcatgtttacccactgacgcagcgcacccatgtagttaccaatggtcaattcaccactgggctgtgcgccactaaaaacgatgggcttagtcatttttgctttcctgattttcgctatgcggaagccctaatgcgggcagaaggtcatttatagactgataaattacatcaggctggctgagatcgatagcctcgccgtagttatatccgtaggttaagccaacacttgggcaacctgccgcttttgccgcctgaatatcattgcgactgtcgccgacaaacagcatctgttgtggggcaattcccatccgctcagccaccagtaacagcgggtccggatgcggttttttgttttgcacatcatcaccaccaatcaccacgctgaagtatttggcgatatctaaggcttcgagcagcggcgcgacgaacggcgtcggtttgttggtgaccaggcctagcggcaggcctttagcctgcaacgcgcccaacgtatcggcaacgtgcgggaacaaaaacgtcccctcttcggcaacctcgccatagtagcgatcgaacagtttacgcagaatacgtacctgttcttctgccggaatgtcgtcatcaacgggcggtttacccattgttttacgctgagtcgcacgttcctgacgcgcccaggtcaatgcgcgctccatcagaacatctgcgccgttaccaatccaggtaataacgcgttcttcacctgcgacgggcaactccagcgcatacagcgccatatctaccgcagcagcaagaccaggagcactgtcgaccagcgtaccatcaagatcaaaagcgacgccgcgaatatcttcaaacttattcatgacttacctttgccagttcactgcgcatttcatcaatgacttttttgtagtctggctggtcgaagattgcgctaccggcgacgaacatatccgcgcccgccgcagcgatttcgccaatgttgttcaccttcacgccaccgtccacttctagtcgaatgtcaaagccagactcgtcgatacggcgacgtacttcgcgcagtttatccagtgtttgaggaatgaaagactgaccgccgaaaccagggttgacggacatcagcaggatcacatccagcttatccatcacgtaatccagatagctcagaggtgtcgccgggttaaataccagacccgctttacagccattttctttaatcagttgcagcgtgcggtcaacatgctcggaggcttctggatgaaaggtaatgatgctggcaccagcggcagcgaaatcaggcacaatgcgatcgacgggtttcaccatcaggtgtacgtcgataggggcggtaatgccatagttacgcaaggatttcagcaccattggcccaatcgtcagattgggaacatagtggttatccatgacgtcaaaatgcacgacatcagcgccagctgccagggcttttgcggtatcttcacccaggcgggcaaaatcagcgctcagaatactgggggcaatcaaatactgtttcatccgcttctccttgagaattattttttcgcgggactaacgactcctggtttgtacaaagccagcagttcgtccacctttttacgtgtgccgccgttgctgcttatactgcgtcgaactttgacgacatgcaattttgcgcgctgataccactcacgcgttaacatcgtatcgtgattggagatcagcactggaatatggcgctcaaccagaccttcggcgatctccgccagatgcgcttgttgttcaagcgtaaaactgtttgtgtgatacgccgtaaagttggcggtcgcagacagcggtgcataaggcggatcgcaatagacgacggatgcatcatctgcgcgcgccatgctatcggcgtaagactcacaatagaaaaaggcattctgcgctttttcagcgaagtgatacaactctgcttccgggaaatagggttttttgtagcggccgaacggcacgttaaactcaccgcgcagattgtaacgacacaggccgttgtaaccgtagcggttcaaatataaaaacagtaccgcccgacggaacggatcctggcttttgttgaactcttcgcggaactgatagtaaacctcggcgcaatttgtttcgggaacaaacagctcgcgtgcggcctgtacgtactcatcagtacgcatcttcacaatgttatagagactgatcaggtcgctattgatatcggcaaggatataacgagaaaagtcggtgttgagaaacacgctcccggcacctacaaaaggctcaaccagacattcgcccttgggcaaatgccgtttaatatcatcaagcaggggatacttgccccctgcccacttcaaaaaagcgcgatttttcttcatgctgactaactaattacaccttctccggctgtggagaaagctccgacagcatccagcgcttcaggcaactcccgcaacgataaaccattgcgggagataaccttgattacttcagatcggcctgtacctgacgcagcggtttcgcccacgggtttttggcctggacatctgctggcaatgtagataccgcttttttcgcctcttctttgctagcgtacacgccagaaaccaggacataccacggctgaccattacgcgtcgtttcatagacaacgtagtttttcagattctctttcttcgcccaaccgttcaggttgtcgtagttagaggaactgctcagctgcagagtgtaatggctggacggtgcgcttttcaagctaccaacattacctgcggtcttcgccccagcagcgggtgttgctgtggtttgcgccggggatgccgtctgtactggagccgtagtcgccgtctcttttggtgctggcgtagaagtcgcagccggtgccttcgtgctcgccacaggggcagctggttcagtacgcttcggcgtctgtgctaccggcttcggctccgttttcacggttgcttgcggttttttcggttcaatcaccgcctgctgacgagctgggcgcgtagtggacggacgttcagcggtttgcgttttcgccgtgtcacggcttgcattgccattgcgaacaggcgcaaccgttgcgggttcagtcggcaacgtggaattgaccgccacattgttcagctgttgctgattttgtggctgggtcagcgcattgttcaggtcaccctgcacttcaacacgttgttgaccatccgttgccaccggggtttgcccttgagtcggcgtagaagagatcggtggcagagaaacatcctgctgagtattttccgcagacgtggttcccggcgctggctgcacgccattcgcctgatcggtcgcattgccagcaagatcaatactcttctcgccagacgcggtttgatcgctggaagtggtgctgggggcttttagcgcagaaccgataccgatgatcaacagcagtagaaccagaatgccgacgcccatcatcatatactgacgagaagcgggtttactggctgcttttttgcgcttacgcggacgacgctctacgcgctcttcatccacggtttcatcttcggattcgtcaatttcttcttcgatttccggttcctcattgcgctctttttgcgcacgagtcggacggcgatcgtcagtgtcatcaagttcaatatcatcaaaattgatctgcggttcgccacgttcagtacgctcagaacgttcagaagattgacgagaacgaccagtacgacgatcgctgggatcgggtttcagctcgtcttctggtttgaattcatccatttaacaccccactaaaaggttaatgcttaccacgttgcaattaacctgaagctaatagaccgcttgataagcggcctgacctttcttgttgttacgcactttgacaatcggcaatggcgttaagaacaagctcgtggctaacgccgctgcgaacttcactcttaccaattgccaacggaagaattaagcgcatctctcccgcaaggactttcttgtcacgcagcatatgcggtaaatacgcctgcgcggacatttcgcgcggcccattgaccggtaacccagcccgcttgagcagggttataatacgctgcgtttcggcagaactaaactgcccgagacgttcgctcgtccgcgccgccatcaccatacccgcagcgaccgcttcaccatgtaaccaattgccataccccatttcagcttcaatggcatgaccaaaggtgtgtcccagattcagtaaagcacgtaacccggtttcgcgctcgtcggcggcgacaacttctgccttcagttcacaacaacggcgaatacagtacgccattgccggaccgtccagacgcaacaacgcatccagattctcttccagccagttaaaaaacgcaccgtcaagaataatgccgtatttgatgacttctgccagcccgctcgctaactcacgcgggggaagcgttttcagacagtcgagatccaccaccacactagcaggttggtagaacgcgccaatcatgtttttaccgaggggatggttgaccgcagttttgccgccaacggaggaatcgacctggctcagtaacgtcgtcgggacttgaatgaaacggacaccgcgctgataactcgccgccgcgaagccggtcagatcgcccactacgccgccgccaagcgccaccagcgtagtatcgcgaccatgcggtttttgtaacaacgccgtaaagacggtatcgagtacagccaggcttttatactgctcgccgtcagggaggataacgctatcgacgttaacacccgcctgttcaagtacgccgcggaccttatcgagatacagaggagccagggtttcgttggtgaccaacatgacctgctcgccgcttttcagcggtaagaaactagctggttcattaaacaaaccagatgcgatggtaattgggtaactacgttccccgagagtaacgacaatcctctccataacgcgacatccaccttaattactgtacccgcagacgagtgtatataaagccagaattagttgctttccagcatgtgaataatctggtttgcaaccactttagcgctttgatcatcagtacgaatggtcacgtcggcaatctcttcatacagcggattgcgttcattggccaacgcttccagaacttcacgcggcggtgtttcaacgtgcagcaacgggcgttttttatcacgctgcgtgcgtgcaagttgcttttcgatggtcgtttcaagataaacgacaacgccacgagcggaaagacggttacgcgtttcacgggatttcacagagccgccgccagtagccagcacaataccctgtttctcggtcaactcattgatgaccttttcttcgcgatcgcggaagccttcttcgccttctaaatcgaaaacccagcccacatcagctccggttcgtttctcaatctcttgatcggaatcgtaaaattccatattgagttgttgagctaactggcgcccaatagtgctttttccggcacccataggcccaaccagaaagatattgcgtttctctgccattttttcggtactactaagactattcgttaatgataaacccgcttcgctcagagagcgccgcaggacatgaactgaaacctcataagatattgcgagagtcagactgaaaattatctcaatactccagcgggtttggcaactgaataaatcacccatccctctgcatatctggtcgctgcaagcgcgctgccttgctaccaccgctctggcgataaatcaccgggtaagattagcgtaaaaaagacagcaaaatgccgcctgaatgataaatcatcatcatggaacgcaggcagcgaagagcaccaactctcaaatcggtactccttgtatgctaaatacctgcgcgcgtcaaatagatgaaacacgttcagcgtaaaaacattaccgcttttacggctgtttactcactggaaaccagtcgtggcgtgataaacaccactaactcgcgtcgttcatcttcttttccgtcatgacgaaatgattgcccgaaccagggaatgtcgccaagcaacggtacgctatcctgaccgcttttatttttacgggtaaaaatgccgcccagcgccaacgtttctccgcttttgacctcgacctgcgtttcgatctcctgcttatcaatcgccagcacttcgccatcggcctgctgtagcacctgccccggaacgttctggctgatgtgtaatttcagccggatgcgacctttttgtaacaccgtgggcgtgacctccatccccaggacggcctctttaaattccacgctcgtcgcgccactttccccgctggaaacctgatatggaatttcgctcccctgtttaatgctggcaggctgaagatgactggccagcagacgcggactggcgataatatccagctgctgtttttgttcgagcgcggaaagctcaagatccagcaagcgtccgttgatgcgcccaatgttaaaaccgacatgcgttgtcgccgtcgctacggagaggtcgctaccaagcgtggtgacttgcccaacgccaccagcgtgttgcgcatcggccagcgtccatttcacgcctaactcacgcaaacttttttcattaatggtgacaatatgcgcgctcagctcaacctgcccgaccggcagatccatttgcgctacccactgttcaagcgcgcttaacgccgttttgttatctcgtagcaaaaggcgattggtgcgtttatcgacggtcatactccctttggcactcagcagcttctcccccgctttcgccagttctcccgcgtcggcgtattgcagggttatactgcgattttccagcggcagatttgcctgcgcccgcgcctgctccgcctcctggcgggcgatattgttattctgccaggcaatggaatgcacactgagaatgttgccttcctgccgcgttatcagtccggcgcttttcactacagtttgtagtgcctgcttccagggaacatctgttagatgtaagctcaccgtaccgctgacgtctgggctcacgaccaggttcaacttctcctgttcagccagcgcctgcaacacctgagctaccggaacgtcatccaccatcagcgtcactttttgcggctttgccgcctgtacgccgggtatcagcatcaacagtagtgcggctatccattgcttcatttgtatctccttgccgttgccacaaccattgtggcggttcgcagtttgtcccggtacccagcgttagtacgtctggcgtcagctgtaaaattgtccagccgttttccagcacatcgttttgctgcacccgtcgccatttcttttgcccgtcttttattacaccgatgatgcgctcgcctcgccctaccatcccctgatagcgccactggctaagttcgctaatccggcatagatcttccggcggtttaaaagggtcacgcataccggttaaaaggcacaatgcaatacctgccaacaaccagcgtttaaccctcatgcggcgtctccagttgtagcgtgaacaaaagatcatcaccttccacgcttaagctaaaacggctcacgctgacgttgcgctctgccagccgtgtaaatgcgctcggcactgcttcccacagcgttttcaacgccaactcgcctccctgcgcggatggatgccaggaaaccagttgcgcgccggataactgaaaatccagtgggctaaagggcagcgttttttcctcgctgaagggagcggtgtctaccaggcgatacagtgcggcccactgctggtgatgacttgcccgtagtcgaattaatgcgtcgcgctcttcatggtgtgtgctactcagaaaaatgagcgtaactaacatcagcaaccagaatgcccagcaaagctggcggaggcggggacttgtggcgaaccaccagtcaaagaacatgttcatcgctaaccttccttgttaactgatactcaaattgccagcgtccctgcgcatcctgctgcgtggctccccgctgattgagatgaaaagatgcatcctggcggagactcgtttctagtgcgtttaacgcggtaatgcttgttgtcagccccttgatctccagcgttccctgctgccagcttatcgttgtcagccaggcgtgctcgggtaaaagcgccgccagtgcttccagcgcagattgccagtcgcgggtaaattgtcgctggcgctgccgttggctacgctgttcgcgtaactgctgttgctccagcaaacgtggcttcgttatctgtaagctgcgggcgagttgttgttccgcctgaagcaaaactgcgtctatgcgcgcttcggcgctgcctgtcagacgcagtattagcgttatcccgacggccagcagcagaggcgcaacgaacatcagcaaccagaaacgcagaaaagcggtccggcgttgctgtcgccagggcaaaaaattaattggcgggttcatcagtacgccttcccaagcgccagccccagcgcgatggcaaagtctccacctggcggcggtagcggcggctgacgaacagaaacggcctcccagggatcaaatccgccttcgccacatatcgcgacgctttcgggatcaacggataacgctgccgccagctccttcgcgctagtcatccccaccgccagtttgcgcccccagctatagcgcgtcgcccacagccactgttcgttatcacgccaggccagacattgctgatgagaaggtaaaaaaggcaggaatcgctgtaatgcactggcatccggggtgatcgcgctcacatgaacacgcaacctttctgccagagtaagcagcgttgccagctctttgctttgcgcggcagtcacgttataggcgggactgagactgtcttcgctgtaatcgaagcgcagggagtccggatccatatccagctcgcgggccatcgtcccactcagccaggccgtttgctcccgctcaccaagggacatgctcgggcgcggaaaactccgctgtaatgtgcgactggcgggaaacgccaacataatgtgatgacgctgcggcagttcgcgactccacggtaacaacgttttagccagctgctgcgcatcaacaatccgcccatctttgataatgtcgttctccagcggcaaccgccaccagcgttgcaaaaagcattcttttgcgccccgcacgatcgcaaccgctaccgcttcttgctgttgtaaatgcaaaccaatttgccagatcttaaatgccattgtgatgatctccttatcacccgtcactctgacgggtatatcaatgcgtctggcttgcctttatactaccgcgcgtttgtttataaactgcccaaatgaaactaaatgggaaatttccagtgaagttcgtaaagtattttttgatccttgcagtctgttgcattctgctgggagcaggcagcatttatggcctataccgctacatcgagccacaactgccggatgtggcgacattaaaagatgttcgcctgcaaattccgatgcagatttacagcgccgatggcgagctgattgctcaatacggtgagaaacgtcgtattccggttacgttggatcaaatcccaccggagatggtgaaagcctttatcgcgacagaagacagccgcttctacgagcatcacggcgttgacccggtggggatcttccgtgcagcaagcgtggcgctgttctccggtcacgcgagtcaaggggcaagtaccattacccagcagctggcgagaaacttcttcctcagtccagaacgcacgctgatgcgtaagattaaggaagtcttcctcgcgattcgcattgaacagctgctgacgaaagacgagatcctcgagctttatctgaacaagatttaccttggttaccgcgcctatggtgtcggtgctgcggcacaagtctatttcggaaaaacggtcgaccaactgacgctgaacgaaatggcggtgatagccgggctgccgaaagcgccttccaccttcaacccgctctacagcatggatcgtgccgtcgcgcggcgtaacgtcgtgctgagccggatgctggatgaagggtatatcacccaacaacagttcgatcagacacgcactgaggcgattaacgctaactatcacgcgccggagattgctttctctgcgccgtacctgagcgaaatggtgcgccaggagatgtataaccgttatggcgaaagtgcctatgaagacggttatcgcatttacaccaccatcacccgcaaagtgcagcaggccgcgcagcaggcggtacgtaataacgtgctggactacgacatgcgccacggctatcgcggcccggcaaatgtgctgtggaaagtgggcgagagcgcgtgggataacaacaagattaccgatacgctgaaggcgctgccaacctatggtccgctgctgcctgccgcagtcaccagcgccaatcctcagcaagcgacggcgatgctggcggacgggagcaccgtcgcattgagtatggaaggcgttcgctgggcgcgtccttaccgtagcgatactcagcaaggaccgacgccgcgtaaagtgaccgatgttctgcaaacgggtcagcaaatctgggttcgtcaggttggcgatgcatggtggctggcacaagtgccggaagtgaacagcgcgctggtgagcatcaatccgcaaaacggtgccgttatggcgctggtcggtggctttgatttcaatcagagcaagtttaaccgcgccacccaggcactgcgtcaggtgggttccaacatcaaaccgttcctctacaccgcggcgatggataaaggtctgacgctggcaagtatgttgaacgatgtgccaatttctcgctgggatgcaagtgccggttctgactggcagccgaagaacagtccaccgcagtatgctggtccaattcgcttacgtcaggggctgggtcagagcaaaaacgtggtgatggtacgcgcaatgcgggcgatgggcgtcgactacgctgcagaatatctgcaacgcttcggcttcccggcacaaaacattgtccacaccgaaagcctggcgctgggtagtgcgtccttcaccccaatgcaggtggcgcgcggctacgcggtcatggcgaacggcggcttcctggtggacccgtggtttatcagcaaaattgaaaacgatcagggcggcgtgattttcgaagcgaaaccgaaagtagcctgcccggaatgcgatattccggtgatttacggtgatacgcagaaaagcaacgtgctggaaaataacgatgttgaagatgtcgctatctcccgcgagcagcagaatgtttctgtaccaatgccgcagctggagcaggcaaatcaggcgttagtggcgaagactggcgcgcaggagtacgcaccgcacgtcatcaacactccgctggcattcctgattaagagtgctttgaacaccaatatctttggtgagccaggctggcagggtactggctggcgtgcaggtcgtgatttgcagcgtcgcgatatcggcgggaaaaccgggaccactaacagtagcaaagatgcgtggttcagcggttacggtccgggcgttgtgaccagcgtctggattggctttgatgatcaccgtcgtaatctcggtcatacaacggcttccggagcgattaaagatcagatcagtggttacgaaggcggtgccaagagtgcccagcctgcatgggacgcttatatgaaagccgttcttgaaggtgtgccggagcagccgctgacgccgccaccgggtattgtgacggtgaatatcgatcgcagcaccgggcagttagctaatggtggcaacagccgcgaagagtatttcatcgaaggtacgcagccgacacaacaggcagtgcacgaggtgggaacgaccattatcgataatggcgaggcacaggaattgttctgattaaaaaggcgcttcggcgccttttcagtttgctgacaaagtgcacttgtttatgccggatacggcgtgaacgcgttatccggctaacaaaatcgtgaaaactcaataaattgcagaaaccccataagcctgataaacattgtgcatcaggcaaacttcacgcatttacactcgcccctgccctttcaaccattcgcgcacgaggaacagcgcactgacattgcgcgcttcattgaagtcagggtcttccagccaatccatcatatgcgccagcggccagcgcacctgtggtagcggctctggctcatcgccttccagactttccgggtagagatcttgcgctaccacgatattcattttgctggaaaagtaagacggtgccatgctgagcttcttcaaaaaagtcagatcgttcgctccaaatccaacctcttcttttagctcgcggttagcggcttcgtagacgctttcacccggatcaattaatcctttgctaaaacctaattcgtaggattcagttcccactgcgtattcgcggatcaggatcaggtgatcgtccacaatcggcacaatcatcactgcttcccggttggttggacgcattcgttcataaacacgccgcacgccattgctgaactccagatccacgctctcgacggtaaacagtcgggaacgggctacagtttcaacattcagaatggtgggtttttgtaaacttttgctcatcgtgggatctatgctgtgaaatcagcggttattgtgcgatatcggacacgctttcggcaatgtgaattgcatgttatttacatttatgtaacttaataaataatcgtcctcaaatcaaattaaaagtcaataggttgaaataactccaggaatttgctgatattccgccttcagagggtttgctatgatcagcggttactgtgatgtgcttaatgatgctcaagttaaactccacgcttgccgatagccaaccgcagaatcatgtattgtgtccggtgcgactgaccacgcctgacagactaagtaagatggggaaagcatgagcaccattgtgatttttttagctgctttgctggcctgcagtctacttgcgggatggctgataaaagtgcgatccagacggcgtcagctgccctggaccaacgccttcgcggatgcgcaaacgcgtaaactcacacctgaagaacgtagcgccgttgaaaattatcttgagagcctgacgcaggtattacaggtgcctggcccaacgggagccagcgcggcaccgatctctctggcgctgaatgccgaaagcaacaacgtcatgatgctgacacacgctatcacgcgttacggcatctctaccgacgatccgaataaatggcgttactacctcgatagcgtagaagtccacctgccccctttctgggaacagtacatcaacgatgagaataccgttgaactgattcataccgatagcctgccgctggttattagtctcaacggtcatacgctgcaggagtacatgcaggaaactcgcagctatgccttgcaacctgttccgagtacgcaggcgagcattcgcggggaagagagtgagcaaatcgagctactcaatattcgcaaagaaacgcatgaagaatatgcgctgagtcgtccgcgcgggctgcgtgaagcgttgctgatcgtcgcctccttcctgatgttctttttctgcctgattaccccggatgtatttgttccgtggctggcaggcggcgcgttactgctgctgggcgcaggtctgtgggggctattcgcgcccccggcaaaatcctccctgcgggaaattcattgtctgcgcggtacaccccgtcgttggggattgtttggcgaaaacgatcaggaacagatcaacaatattagtctcggtattatcgacctggtctatcccgcacactggcagccatacattgctcaggatctcggtcaacaaaccgatatcgatatctatctcgaccgccatgtagtgcgtcagggacgatatcttagcctgcatgatgaagtaaaaaactttccgttacagcactggctgcgcagtacgattatcgctgcgggcagcctgctggtgctgtttatgctgttattctggatcccgctggatatgccgctgaaattcactctcagttggatgaaaggcgcgcagaccattgaagccaccagcgtaaaacaactggctgacgctggcgtgcgggtaggcgatacattgcgtattagcggtacgggaatgtgtaatattcgaacttccggaacctggagcgcgaaaaccaatagtccttttttaccgtttgactgcagccagatcatctggaacgacgcccgcagtttgccattaccagaatctgaactggtcaacaaagcgacggcattgactgaagcagttaatcgccagctgcaccctaaaccggaagatgaatctcgcgtcagtgccagtttacgtagtgcaattcaaaaatccggcatggtattgcttgatgattttggcgacattgtactgaagacagcggatttatgttctgccaaagatgactgtgtgcgactgaaaaatgcgctggtcaatctcggcaacagtaaagactgggacgcgctggtaaaacgcgccaacgccgggaagctcgatggcgtgaatgtgttattacgcccggtgagtgcggaaagcctggataacctggtggcaacctccaccgcgccgtttatcacgcatgaaacggcgcgagcggcacaaagtctaaacagtccggcccccggcggattcctgattgtcagcgacgaaggcagcgattttgttgatcagccctggcctagcgcaagtctttacgactacccgccgcaagaacagtggaacgctttccagaaactggcacaaatgctgatgcatacgccgtttaacgccgagggtatcgtcacaaaaatcttcactgacgccaatggtacgcagcatattggccttcatccgatcccggatcgttccggcctgtggcgctatctcagcaccacattgctgctactgacgatgctgggtagcgccatttacaatggcgtacaggcctggcgtcgttaccagcgtcatcgcactcgcatgatggagattcaggcctattatgaaagctgcctgaacccgcaactgatcacccctagtgaaagccttatcgaataacacgtttgcgcggcaggttatgctaccctgtcgcgcaaattgcttcactctggagatttccctcatgcatatcaacattgcctggcaggacgtagataccgttctgctggatatggacggcacgttgctcgacctcgccttcgataactatttctggcaaaagctggtgcctgaaacatggggcgcgaaaaacggggttacgccacaggaagcgatggaatatatgcgccagcaatatcacgacgtacagcatacgctaaactggtactgtcttgattactggagtgagcaactgggtctggatatctgtgcgatgaccaccgagatgggaccgcgtgccgtactgcgtgaagataccattccgtttcttgaggcactgaaagccagcggtaagcagcgaattttgctcaccaatgcgcatccgcacaacctggcggtaaaacttgagcataccggtctggacgcacaccttgatttattactttccacccacacatttggttatccgaaagaggatcagcggttatggcatgcggtggccgaagctacgggtctgaaagctgaaagaacgctgtttattgatgacagcgaagcgattctcgatgctgccgcgcaatttggtattcgttactgcctcggcgtgactaatcctgattccgggattgccgagaaacagtatcaacgccatccgagtctgaatgactaccgccgcctgatccccagcctaatgtgaaggagacgccatgaaagagaaacctgctgttgaggttcgactggataaatggctatgggctgcccgtttttataaaacccgcgcgctggcccgtgaaatgattgaaggcggtaaggtgcattacaacgggcagcgcagcaagccgagcaaaatcgtcgagctgaatgccacgctcactctgcgccagggaaatgacgaacgcacggtgattgtaaaggcgattactgaacagcgtcgccccgccagcgaggcagccttgctgtatgaagagactgcggaaagtgtagagaaacgcgaaaaaatggcgctggcacgtaaacttaatgccttaaccatgccgcacccggaccgacgcccggacaaaaaagagcgccgcgacctgttacgatttaaacacggcgacagtgaataactgtcacctgcaagagagatgattatgccgcaacatgaccaattacatcgctatctgtttgaaaactttgccgtgcgcggcgaactggtaaccgttagcgaaaccctgcaacagatccttgagaaccacgattatccgcagcccgttaaaaacgtgctggcagaactgctggttgcgaccagcctgttaaccgctacgctgaagtttgatggtgatatcaccgtacagctgcagggcgacggtccgatgaatctggcggttattaacggtaacaataaccagcagatgcgcggtgtggcgcgcgtgcagggcgaaattccagaaaatgccgacctgaaaacgctggtcggcaatggttacgtggtgatcaccattaccccgagcgaaggcgaacgctatcagggcgtagttggtctggaaggtgataccctggcggcctgcctggaagattactttatgcgttctgaacagctgccgacgcgcctgtttattcgcaccggcgacgtagacggcaaaccggctgcaggcggtatgttgttgcaggtaatgcctgcgcaaaatgcccagcaggacgactttgaccacctggcgacgctaaccgaaaccatcaaaaccgaagaactgctgaccttaccggcaaacgaagtgttgtggcgtttgtatcacgaagaagaggtgacggtttacgatccgcaggatgtggagttcaaatgcacctgcagccgtgaacgttgcgccgatgcgctgaaaacgctgcctgatgaagaagttgatagcatcctggcggaagatggcgaaattgacatgcattgtgattactgcggtaaccactatctgttcaatgcgatggatattgctgaaatccgcaacaacgcgtctccggcagatccgcaagttcattaatgagtatgtccggcagagagggctctgccggattttacgactaatacacctgatgcgctttgtcactcattcagattcacattcagcctttcaccatccactacaagatcgcgccacgctttaggcttcgtccccagttttccatccttcgcagctgtgagtaatttttctttcgttatttcgttcggaagtaaactcatatcaagcgcgtcccattcttttctgtcactgtcaaagccatagacaatgactctgtcatcattaaaagcaaacaggatccgctccgcctgaccatcactattcagatcttgctcgaccaggacgcaggcgtctttttcaatacaggtcatcacgttatagcgatcctggattaaggcgctccagaatgtcgcatcaggtttaacagaaccaggggcaattaacacattatcggctaatactttttcgcttacctgttgctgaagatgttgctctccatctaacgccatcagcagatcccgcgcgcgtttcgggtctttcataaacccggcatcgcttttcaggctctcaagcgcagcacgtccatagcgaccgctctgctcgagcatgtagatagttacctggtcactcgtgtttttgccgctctgataacgcgccatatggctgttcacgctaatgcgcatactgtccagcaccgggctattaagaagcaccagtatcaccaacaccaataagctaaccgcaaggttcactttgccctgaagaacaacgggattttgccctttacgccagacgatgctgacaaaataccccaggctccacaccagtaacaccagcaccgccagcacgccctgcaagcggtcgacagtccagccgtactgagcgacccgcagccataacgcccaggcggcgacgaacacatacagcggagcaaccagcaaagcggttttaatcaggcaacgcaacggccctgtccagggaagactcgctttttgcggatcgcggacaatagccattaagatcaattgcaaaaaggccagcgtcaacagcaacccggcggcggagatgtggcgagaaatcgcgctcaggcccgtaaacggcagggtgatgataaacatcagggttagcaaacttactaacggcagcaaccccgtggcgattaacgtgaacaacttttgaatagagtcgattaaacgactctgtgttcgcgcgaggatcaccgccagcgcggtaaccagacctaacgtgagataaataaaccagtcggttgcaaaaaagagcgtattgaaaaacgtgatgccaacaagtttaaacaactcactccacagtaaaagcaccagccacgtcaagccattggcgagaaaaatcaccagtaatataagtacgttatgccatacactctggtaaaaatagcgatagcggctactgtcattgcggatgcgaaggctttgttgtatccacggtagcaacaacattgccatcaacagcagatagcaaccaaaatcccaaagcgccttttcagctctccaggggttcatgccatcagtttgccacttcagccagccgctcatccccagcgtggcaataaacactagcgccagccatccccaaaggcgcttctgtttaaaagagatcacggagaagagtaaaacggaactaaacgcgacggtcgcaggcacgccataaacaatccaactgtgattttttccggaaagccaggcgatcagcaggtagcaaaccagaccctgaagtaatccggtagcaatcatcccccagcgtgttgcgggactaagttcaacgttatccatgttggttatccagaatcaaaaggtgggttaattatcgcatccgggcagtagtattttgcttttttcagaaaataatcaaaaaaagttagcgtggtgaatcgatactttaccggttgaatttgcatcaatttcattcaggaatgcgattccactcacaatattcccgccatataaaccaagatttaaccttttgagaacattttccacacctaaaatgctatttctgcgataatagcaaccgtttcgtgacaggaatcacggagttttttgtcaaatatgaatttctccagatacgtaaatctatgagccttgtcgcggttaacacccccaaaaagactttactattcaggcaatacatattggctaaggagcagtgaaatgcgcgttaacaatggtttgaccccgcaagaactcgaggcttatggtatcagtgacgtacatgatatcgtttacaacccaagctacgacctgctgtatcaggaagagctcgatccgagcctgacaggttatgagcgcggggtgttaactaatctgggtgccgttgccgtcgataccgggatcttcaccggtcgtagtccaaaagataagtatatcgtccgtgacgataccactcgcgatactttctggtgggcagacaaaggcaaaggtaagaacgacaacaaacctctctctccggaaacctggcagcatctgaaaggcctggtgaccaggcagctttccggcaaacgtctgttcgttgtcgacgctttctgtggtgcgaacccggatactcgtctttccgtccgtttcatcaccgaagtggcctggcaggcgcattttgtcaaaaacatgtttattcgcccgagcgatgaagaactggcaggtttcaaaccagactttatcgttatgaacggcgcgaagtgcactaacccgcagtggaaagaacagggtctcaactccgaaaacttcgtggcgtttaacctgaccgagcgcatgcagctgattggcggcacctggtacggcggcgaaatgaagaaagggatgttcagcatgatgaactacctgctgccgctgaaaggtatcgcttctatgcactgctccgccaacgttggtgagaaaggcgatgttgcggtgttcttcggcctttccggcaccggtaaaaccaccctttccaccgacccgaaacgtcgcctgattggcgatgacgaacacggctgggacgatgacggcgtgtttaacttcgaaggcggctgctacgcaaaaactatcaagctgagcaaagaagcggaacctgaaatctacaacgctatccgtcgtgatgcgttgctggaaaacgtcaccgtgcgtgaagatggcactatcgactttgatgatggtagtaaaaccgagaacacccgcgtttcttatccgatctatcacatcgataacattgttaagccggtttccaaagcgggccacgcgactaaggttatcttcctgactgctgatgctttcggcgtgttgccgccggtttctcgcctgactgccgatcaaacccagtatcacttcctctctggcttcaccgccaaactggccggtactgagcgtggcatcaccgaaccgacgccaaccttctccgcttgcttcggcgcggcattcctgagcctgcacccgactcagtacgcagaagtgctggtgaaacgtatgcaggcggcgggcgcgcaggcttatctggttaacactggctggaacggcactggcaaacgtatcagcattaaagatacccgcgccattatcgacgccatcctcaacggtagcctggataatgcagaaaccttcactctgccgatgtttaacctggcgatcccaaccgaactgccgggcgtagacacgaagattctcgatccgcgtaacacctacgcttctccggaacagtggcaggaaaaagccgaaaccctggcgaaactgtttatcgacaacttcgataaatacaccgacacccctgcgggtgccgcgctggtagcggctggtccgaaactgtaatgatttgaagctggagaatatctatccagtatcttatagaaagcaaaacgggaggcaccttcgcctcccgtttatttacccttcttttgtcgtgccctgcgcccgcgttaccggcactggcagccaggcgcgaatggaaagcccgccccgctcgctggtgccaagctccagcatcccgttatggttatccacgatacgctgcacaattgccagccctaatcccgtgccgctaatggtgcgcgcactgtcgccgcggacaaacggctggaacaggtgcttacgttgttccggcgcaattcccggaccgtcatcttccacctggaaccaggcgcgattcggctccgttccgctgctgactttgatccagccattgccataacgggcggcgttgaccaccatattcgccaccgcgcgtttgatgctcagcgggtgcattttcacttcaatgctgccggggtaaagcgcggtttcaatttcccgctcatagccactttcggcagcaatcacctcaccgagtactgcattaagatccgccatttccatcggcatctcctgcccggtgcgcaggtagtcgataaactgctcaatgatggcgttgcactcttcgatatctttattgatgctttctgccagatagccatcctgctcgctcatcatctcagtcgccaggcgaatacgcgtcagcggcgtgcgcaagtcgtgacttacccccgccatcagcagcgtgcggtcatccgccagttgcttaacaccagccgccatatggttaaaggcacgggtaacggaacgcacctcgctagcgccatactcacgcagcggcggcggaataatccctttaccaacctgcaaggctgcgtgttcgagatcgaccaacggtcggttctggatacgaataaacagccacgccccgcctatcgccaatagcataatcgccagcgtatagcggaacagcggagagaaatcgccctgatgaatttcggtcagcggcacgcgtacccagatattggggctcagccaggttttcagccagacgacagggctacttttgttgacctcaacgcgcacttccgtcgggccgcccagttgctgcgccatctgatggcttaagaattcatagtgttgcgcccaacgcagacctgcctcttcggcagcctcgttggagtagagagagatccccagctcacggtagatctcccgacggaaagcgggaggcacaaccaactgcgtgccgtcctccagttgcagtttgtcggtcatcaacatacgcacttcgtacgcgaggactttattaaactgctggaggctcggcaaaatcgcgaagttcagcaccaccagataagtcgtcaccaggctggcgaacagcaaggtgacgatgagcaataacgtacgggcaaaactacttcgtgggctgaagcgcaatcgcctcatgctttagagccgtccggtacaaagacgtagcccagaccccagacggtctgaatgtaacgcggatgcgctggatcttcttccaccatgcggcgcagacggctaatctgcacgtcgatggagcgttccattgcggaatattcacgaccacgggcaaggttcatcagcttatcgcgggagagcggctcacgcggatggctgaccagtgccttcagtaccgcaaactcaccgctggtgagcggcatcggctcgtcttcgcggaacatttcgcgcgtaccgaggttaagtttgaacttaccgaaagcaattaccgcctcttcctgactcggtgcgcctggcagttcgttcgcctgacgacgcagcaccgcacggatacgggccagcagttcacgcgggttaaacggttttggaatgtagtcgtcagcgccaatctccaggcctacgatacggtccacttcttcccctttcgccgtcaccataatgatcggcatcgggttgctctgactacgaagacgtcggcaaatgctcaagccatcttcaccaggtaacattaaatccagtaccataagatggaaagattcacgagtcagcaggcgatccatctgttctgcattagcgacgcttcgaacctggaagccttgttcggtgagataacgttccagcagcgcacgcaggcgcatgtcgtcatcgaccaccagaatcttgtagttctcttgcattgtttgtactcccaaaggttcgcaacaatttgtaagcgtgtattcttaaaaaagctcacgttcgtcaccagctaaatctggtatgaatttcagcctaaattgttacaaagcatattaaacagcagcttaagtatacaatttattcggcgaaacattattgattctgttgatatgatcacgttatacccaatgtgcgcattatcaaacagacaaagggaatcaacgagatgaaaacgcccctggttacccgggaagggtatgaaaaactcaaacaagagcttaattatctctggcgtgaagaacgcccggaggtcacaaaaaaggtgacctgggccgcaagtctgggcgaccgcagcgaaaatgctgactatcagtataataaaaagcgtctgcgtgaaatcgaccgtcgcgtgcgctatctcactaaatgcctggaaaatctcaaaatcgtcgattactcccctcagcaggaaggcaaagtcttttttggcgcgtgggtggagattgaaaacgacgatggcgtgactcaccgtttccgtattgtcggctacgatgaaatttttggccgtaaagattacatctctatcgattccccgatggcccgcgcattgctgaaaaaagaagtcggcgatctggcggtggtgaatacccctgccggggaagcgagctggtatgttaatgctatcgagtacgtgaaaccgtaaggaagagtcttaacctcctgccgatggctggcatttttgccagccagtccgtataactatcccctgatttttgatccgaaaagatgaactcaaaccatgatgaatgatagcttctgccgcattattgcgggtgaaattcaggcgcgcccggaacaggttgacgctgccgttcgcctgcttgacgaagggaataccgtgccgtttatcgcacgttatcgtaaggaaatcaccggcggtctggatgacacgcagctgcgtaatctggaaacgcgtctgagctatctgcgcgagctggaagagagacgtcaggcgatcctcaagtccatttccgagcaaggcaaactcaccgatgatctggcgaaggccatcaacgccaccctaagcaaaaccgaactcgaagacctctacctgccctacaaacctaaacgccgcacccgcgggcaaatcgccattgaagcagggcttgagccgttggctgacctgctgtggagcgatccgagtcacacgccagaagtcgccgctgcacaatatgtttatgccgataaaggcgtggcagataccaaagccgcgctggatggcgcgcgctatatcctgatggaacggtttgccgaagatgccgcgctgctggcgaaagtgcgtgattatctgtggaagaacgcgcatttggtttctacggtggtgagcggtaaagaagaggaaggggcgaaattccgcgactatttcgatcatcacgaaccgttgtccacggtgccttctcaccgcgcgctggcgatgttccgtgggcgtaacgaaggcgtacttcagcttagcctgaatgccgatccacagttcgatgagccgcccaaagagagctattgcgagcaaatcatcatggatcaccttggcctgcgcctgaacaatgccccggcggatagctggcgcaaaggcgtggtgagctggacgtggcgcatcaaggtgctgatgcatctggaaaccgaactgatgggcaccgtgcgcgaacgtgcggaagatgaagcaatcaacgtctttgcccgtaacctgcacgatctgctgatggcggcccctgccggactgcgtgcaacgatgggcctcgatccgggtctgcgtactggggtaaaagtggcggtggtcgatgccactggcaaactggtggcgaccgacaccatttacccgcacaccggacaggccgcaaaagcagcgatgaccgttgctgcgctgtgtgaaaaacataacgttgaactggtagcgatcggtaacggtacagcttcccgcgaaactgagcgtttctatctcgatgtgcagaagcagttcccgaaagtgaccgcgcagaaagtaatcgtcagcgaagcaggcgcgagcgtttacagcgcttccgagctggctgcacaggagttcccggatctcgacgttagcctgcgtggcgcggtgtctatcgcccgccgtttgcaggatccgctggcggagctggtgaaaatcgatccgaaatctatcggcgtaggtcagtatcagcatgacgtcagccagacgcaactggcccgcaaactggacgcagtagtagaagactgcgtaaacgccgttggcgtcgatctcaacactgcttctgttccgctgttaacccgcgtggcgggcctgacgcgcatgatggcgcaaaacatcgttgcctggcgcgatgagaacggtcagttccagaaccgtcagcaactgttaaaagtgagccgtctggggccgaaagccttcgagcagtgcgcgggcttcttgcgcattaaccacggtgataacccgctggacgcgtctaccgttcacccggaagcctatccggtggtggaacgcattctggcagcaacacagcaggcactgaaagatctgatgggtaacagcagcgaactgcgtaacctgaaagcgtctgactttactgatgagaaattcggtgtgccgacggtaaccgacatcatcaaagagctggaaaaaccgggtcgcgatccgcgtccggaatttaaaaccgctcagtttgccgatggcgtcgagacaatgaacgacctgcaaccgggtatgatcctcgaaggcgcagtgaccaacgtcaccaactttggcgcgtttgtcgatattggcgtgcatcaggacggcctggttcacatctctagtttgagcaacaagtttgtggaagatccgcataccgtggtgaaagcgggcgacattgtgaaggtgaaagtgctggaagtggatcttcagcgtaaacgtatcgccctgactatgcgcctggatgagcagcctggcgaaaccaacgctcgtcgcggcggcggtaatgaacgcccgcaaaacaaccgcccggcagccaaaccacgcggtcgtgaagcgcagcctgccggtaatagcgcgatgatggatgcgctggcggcggcaatgggcaaaaaacgttaaacgcccgtactggcctacggttcgaatttgcacgaaatcgtagggcagataaggcgttcacgccgcatctggcaacgaacgccttgcctgacataaaagtgccggagaatatctccggcatttttattccacagccaaactcataatatattccggcaatatttatcatttcattaacaactgaaaccttaattaaacattagccagtccgggtaattcactattcgaattatattttcgctgcgatataaccttgagccacatcaacattgagtcagattattattcaaaccaacattcgcacacattttaagtattgctgatagaaaccattctcattatcattgtgttgttgattatttaatctctcctttgttggcaaatcatctggtctcatgtcgctgtcaaacgccccatgaggtagttatccagttaatgagaaacaagtaggcacctatgcaatacactccagatactgcgtggaaaatcactggcttttcccgtgaaatcagcccggcatatcgccaaaaactgctttctcttggcatgttacctggctcctcttttaatgtggtgcgcgtcgctccactcggcgaccccattcatatcgaaacccgtcgtgtgagcctggtattacgcaaaaaagatctggccttattagaagtggaagcggtttcctgttaatacggtgataacaacaatgaaaaaattaaccattggcttaattggtaatccaaattctggcaagacaacgttatttaaccagctcactggcagtcgtcagcgtgtaggtaactgggctggcgttaccgtcgaacgtaaagaagggcaattctccaccaccgatcatcaggtcacgctggtggacctgcccggcacctattctctgaccaccatcagtagccagaccagcctcgatgagcaaatcgcctgtcactacattttgagtggcgacgccgacctgctgattaacgtggtggatgcgtctaaccttgagcgtaacctgtacctgacgctacaactgctggaactcggcattccctgcattgtggcactgaacatgctcgacattgccgagaagcaaaatattcgtattgaaattgatgctctgagcgcgcgtctgggctgtccggtgatcccgctggttagtacccgtggtcgcggtattgaagcgctcaagctggcgattgatcgctataaagctaacgagaatgtggaactggtgcattacgcacagccgctgctcaacgaagcagatagtctggcaaaagtgatgccttccgacatcccgctgaaacaacgtcgctggctgggcctgcaaatgctggaaggcgatatctacagccgcgcctacgccggtgaagcgagccagcatctggatgccgccctcgcccgtctgcgtaatgagatggacgatccggcgctgcacattgccgatgcgcgttaccagtgcattgctgccatctgtgatgtggtaagcaacaccctgacggcagaacccagccgtttcaccactgcggtagataaaatcgtgctcaaccgtttcctcggtctgccgattttcctctttgtgatgtacctgatgttcctgctggctatcaacatcggcggggcgttacagccgctgtttgacgtcggctccgtggcgctatttgtgcatggtattcaatggattggctacacgctccacttcccggactggctgactatcttcctcgcccagggcctgggtggcggcattaacaccgtgctgccactggtgccgcagattggcatgatgtacctgttcctctccttccttgaggactccgggtatatggcgcgtgcggcgtttgtgatggaccgtctgatgcaggcgctgggcttgccggggaaatcctttgtgccgctgatcgtcggtttcggttgtaacgtaccgagcgtaatgggtgcacgtacgcttgatgcaccgcgtgaacgtctgatgaccatcatgatggcaccgtttatgtcctgcggcgcgcgtctggctatcttcgcagtattcgcggctgccttcttcgggcagaacggtgcgctggcggtcttcagcctgtatatgctgggtattgtgatggcggtgctgactggcctgatgctcaagtacaccatcatgcgcggtgaagcgacgccgtttgtcatggagttgccggtctatcatgtaccacacgttaaaagcctgattatccagacctggcagcgtctgaaaggcttcgttctgcgtgctggtaaagtgatcatcatcgtcagcattttcctgagcgctttcaacagcttcagcctgagcgggaaaatcgtcgataacatcaacgacagcgcgctggcgtccgtcagccgggtgatcaccccggtcttcaagccaattggcgtgcatgaagataactggcaggcaacggttggcctgtttacaggtgccatggcgaaagaagtggtagtgggtacgctcaacaccctctacaccgcagaaaatattcaggacgaagagttcaatccggcagaatttaacctcggtgaagagctgttcagtgcgatagatgaaacctggcagagcctgaaagacaccttcagccttagcgtactgatgaaccccattgaagccagcaaaggcgacggcgaaatgggtaccggggcgatgggcgtgatggatcagaaattcggtagcgcagcagcagcttacagctacctgattttcgtcctgctgtatgtaccatgtatcagcgtgatgggggctatcgcccgtgaaagtagccgtggctggatgggcttctccatcctgtgggggctgaatatcgcttacagtctggcaacattgttctatcaggtcgccagctacagtcagcatccaacttacagcctggtgtgcattctggcggttatcctgtttaacatcgtggttatcggtctgctgcgccgcgcgcgtagccgggtggatatcgaactgctggcaacccgcaagagcgtaagcagttgctgcgcagccagcaccaccggtgattgccattaatggctagtcttattcaggtgcgcgatttgctggcgttacggggccgtatggaagcggcccagataagccagacattgaacactccacagccaatgattaacgccatgctgcaacaactggaaagtatgggcaaagccgtgcggattcaggaagaacctgacggctgcctctctggcagttgtaaaagctgcccggaaggaaaagcctgtctgcgcgagtggtgggcgctgcgttaaccttactccatcgcctgttttggaaagcccggtatgcgtctgcatccgggcttttttgcgtgcggctttccataaaaatgcaactcttgcagcacggcgtaagttcctttgaaagcatctcgcagggatgaaaactcgctaatacacaggtgtggagtggcgcgtagagtcgcggcattcaaacaacaggtgaaggaacgccatgagcaaaaagcagagttccaccccacacgatgcgctgttcaaactctttttacgccaaccggacacggctcgtgattttcttgcgtttcatttaccggcacccattcacgcgctttgtgatatgaaaaccctcaagctggagagcagcagctttattgatgacgatctgcgtgaaagctattccgatgtgctgtggagcgtgaaaacggaacaaggaccaggatacatctattgtctgattgaacatcaaagcaccagtaacaaactgatcgcatttcgcatgatgcgttacgctattgccgcaatgcaaaatcaccttgatgctggatacaaaacgttgccgatggtggtgccattgttgttttaccacggtattgaaagcccctatccctatagcctgtgttggctggattgtttcgccgatcccaaactggcaaggcagctttatgcctccgcatttccgctgattgatgtcaccgtcatgcctgatgatgaaatcatgcagcaccgacgtatggcgctgctggagttaattcaaaaacatattcgtcaacgcgacctgatggggctggtagagcaaatggcctgcttattaagtagtggatacgctaatgacagacaaatcaaagggctgtttaattacatactgcaaactggcgacgctgtacgttttaacgattttatcgacggcgttgccgaacgtagtccgaaacacaaggagagtttaatgactattgcggaaagattgcggcaggagggggaacaatccaaagccctgcatatagccaaaataatgcttgaatccggagttcctcttgcagacatcatgcgctttaccgggctgagtgaagaagagttggctgcggcgagtcagtaaagttctgtctcgccatttcaaaagccacttacaccctctgcttcaacgccaccagcaggtgacaaaactcggccggatggctaataaatggcgcatgggccgctttggcgaagatataactttcgctgtgaggccaaagtttatccagcatcggcaccactttgcgcggcaccagaccgtcgagatagccatacaatcgcaaaaacggcatggacacgttttgcagcggctgacggagatcgaccgttttcaggatttccagcccgccattaagcacgtcaacctccggcatcggtaacgccagaacggttttcttcaacgcccgcgcatcctggcgcgccgtttcagtccccatggtttgtaacgccaggaaccgctccactgtacgctgaaaatcatcactgagttgctgctgaaatcccgccagcacgtccggttttatccccggccactcgtcacgagcactaaaacaaggactgctcgccacggtgaccagcgcctgaacacgctcgggatgggttaacgcaatctggcttgccaccagcccgcccagactccagcctaaccaaatggctttatcaggtgcctgttgcagcacggcttcggccatatcagcaagactcagcgcaccaaatccccggctacgcccgaagccgggcaggtcaacaaggtgcagcgtaaaatggctgctaagttcctcgtcaatgcaacgccacacttcggcattcagtccccatccgtgcagcagcacaagatgaacattcccctgacctttggtctgccaccagatgttattcatccgctattgttctcttttgacttacaaggatgaacatatgctaacagtaccgggattatgctggctatgccgaatgccactggcgttaggtcattgggggatttgtagcgtctgtagtcgcgccacccgcacagataaaacgttatgcccacaatgtggattacccgccacacactcccatcttccctgcggtcgctgcctgcaaaaaccgccgccctggcaaagactggtcacggttgccgactatgcgccgccgttaagtccgcttatccaccagcttaaattttcccggcgcagtgaaatcgccagcgccctgagtcgtctgttactattggaagtcttacacgctcgtcgcaccaccgggttgcaattgccggatcgcatcgtcagcgttccgttatggcagcggcgtcactggcgtcggggatttaatcagagcgatttgctgtgtcagccgttaagtcgctggttgcactgccaatgggatagcgaagccgtcacacgtacacgggccactgcgacccagcattttctcagtgcccggctgcgcaagcgcaacctgaaaaatgcctttcgtcttgaattgcccgtgcaaggtcgccatatggtgattgtggatgatgtcgttaccaccggaagtaccgtcgcagagattgcgcagttgcttttacgcaatggtgcggcggctgtccaggtctggtgcctttgtcgaaccttgtaaagcctcgatgatgggcgtattataaccaactaaaatagtcaactattaggccattactatgatccgtatttccgatgctgcacaagcgcactttgccaaactgctggcaaatcaggaagaagggacacaaatccgcgtatttgtgattaaccctggcacgcctaacgctgaatgtggcgtttcttattgtccgccggacgctgtggaagccaccgacacagccctgaaatttgacctgctgaccgcgtatgttgatgagttaagcgcaccatacctggaagatgcagagatcgattttgttaccgaccagttgggttcccagttaacgctgaaagccccgaacgccaaaatgcgtaaagtggcagacgatgcaccgctgatggagcgcgtggagtatatgctgcagagccagatcaacccacagcttgctggtcacggtggtcgcgttagcctgatggaaatcaccgaagacggttacgccattctgcaatttggcggcggctgtaacggttgttccatggtcgatgtgacgctgaaagaagggatcgagaagcagctgctgaacgaattcccggagctgaaaggtgtgcgcgatctcaccgaacaccagcgcggcgaacactcctactactaagttatcccctcttttgtagattgcccgatgcgacgctaaagcgtcatttcgggcctacgttgaacatgtgccagacgttggcgcagcattgctttgtcaaatcctcggttcgtttccccgcgataatatgaccaacctctcataatttaaatttaccccgctctggtgattctcaaacgccagatgttacccgtatcattcacatgggtaccaaacatactcctgacatctgactacaataattagttttagtgggtatcagtcgtggtgccgcaatatctctgttcccgattgggataattagagtttgtcgtcagaaaattgacgttacccataacaaatgaaaggccaggtaaatcatgccattagtcattgttgctatcggtgtaatcttgttgttgctcctgatgatccgcttcaaaatgaacggcttcatcgctctcgtcctcgtggcgcttgctgttggattaatgcaaggaatgccgctggataaagttattggctccatcaaagccggtgtcggcgggacgctcggtagccttgccctgatcatgggttttggcgcaatgctgggcaaaatgctggcagactgcggtggcgcacaacgtatcgccaccacgctgattgccaaatttggtaaaaaacacatccagtgggcggtggtactgaccggttttaccgttggttttgccctgttctatgaagtgggctttgtgctgatgctgccgctggtgtttaccatcgcggcttctgcgaatattccactgctgtatgttggtgtaccaatggcggctgcactgtctgtgacccacggcttcctgccaccgcatccgggtccgactgcgattgccaccattttcaatgccgatatgggtaaaaccctgctgtacggtactattctggcaatcccgaccgtgattctcgccggtccggtttacgctcgcgtgttgaaaggtatcgataagccaattccggaaggtctctacagcgcgaaaaccttcagcgaagaagagatgccgagctttggcgtcagcgtctggacctctctggtgccggtagtactgatggcgatgcgtgcgattgccgaaatgatcctgccgaaaggtcacgctttcctgccggtagcggagttcctcggtgacccggtaatggcaacgctgattgccgtgctgattgcgatgttcacctttggtctaaaccgtggtcgtagtatggatcagattaacgacacgctggtttcttccatcaaaatcattgcgatgatgctgttgatcatcggtggtggcggtgcgttcaagcaggtgctggtagacagcggcgtggacaaatacattgcttccatgatgcacgaaaccaacatttctccgctgctgatggcctggagcattgctgccgtactgcgtatcgcgctgggttccgcaaccgttgcggcaatcactgcgggtggtatcgcggcaccgctgattgcaacgacgggtgttagcccggagctgatggttattgcggttggttccggtagtgtgattttctctcatgtgaacgatccgggcttctggctgttcaaagagtactttaacctgactatcggcgagaccatcaaatcctggagcatgctggaaaccattatcagcgtgtgcggtctggtaggctgtctgctgctgaatatggtgatttgataacactgactgccggatgcggcgtgaccgccttatccggcctacgattcgggatgaattagtaggccggataagacgcgtcaagcatcgcatccggcatcaaccgcactttacttcttcttcgctgcagctctgcgccgtctgtccaaatccttcagcaacttgttcacgccatcatcggcaaacatgctctcaagcgttgcggaaagcttgcgtcgccagtttttatactggtaactggtgccaggaatattcaccggttcggccatatccagccagtcttccggctgtagtcctaacagagcactgttactgtcggcaatgtagcgctgcaaaccacggttcagcgtcggcgtcatgctcatcaagcttgccttatgcccggcacgtttcggcagacaaccatatttatgcagtgcatccagcagcccttgcttcgccagttcgcgatcctgatacagaccgcgcagtaccacttcatccggatacagccccagggttttgcccagcgttagatccccgcactcccagtaaccgcgcagcgttggcaggtcatgtgtcgccgcaaccgccatgctctgctccggatacgctttcggtgcacggaacgtcttctcgtggtcgttttcgaaatagagcactttgtaagagtacacaccgctgctgcgcagcttaccgacaatctctaccggtacggtaccgagatcttcaccaatcaccatacagcgatgacgtttactttcgagtgccagaatgctgagcagatcatccaccggatagtgaacatacgcgccctgatctgccgtctcgccatacggtatccaccacaaacgcagcatgctcatcacatggtcaattcgtaatgcgccgcagttttgcatattggcacgcaacagctcgataaacggttcataggcacgcgcggtgatgatatgcgggtccattggcggtaatccccagttctgccccaacgggccgaggatatccggcggcgcgccaacgcttgctttcaggcaatatagttcacggtcacaccaggtttccgccccaccttccgctacgccaaccgccagatcacgatacaagccaatcggcatttcatagccctggcttatctcccagcaggcggcaaactggctgtaagccagccactgcaaccagagataaaaatcgacgtcatcacgatgttcttcgcagaactgacgcacttctggactatccacgttctgatacatctctggccatgcaggccagccccagcgcatttcgtcctctttcacttgctgggcatgtagcgcatcaaaggctgcctgccagaacaggctgtcgccctgctctgcaacaaactggcgaaacgcggccatctgctcatcatcacgttgcgcgaaacctttccacgccattcgtaatgctgtcatttttagggcggtaaccgtggagtaatcgacccagtcggcatcgcgcgcctgttgcagcgtctgttgcgtggtcggcaactgccaccaggcctgagcctcttcgctaagatggaaatcttcaacggcgttaacgtcgatataaatcacattcagccaacggcgagaagacgggctgtatgggctggcgctctccggatttgccggatagagcgcatgaatcgggttcaggccaatgaagctcccgccacgttttgccacatccaccagcatcgctttgagatcgccaaaatccccaataccccagtttttttcgcttcgcagcgtataaagctgaacgcaggcaccccacagcttttgtttattcagcaacgcctgcggttcgtaacagcgtttcggggcgacaatcacccggcaatgcgcgcgctggtcgtcctgggtgagtgtcagcgtgtgataaccttccggcagcttcgtcggtagattgaacgctttgccccccgttacatggcctttgtactgcgttccttcttcggtggtcagcagccagctatattcgccgctgccctccaccaccatcggcatttttttgccgctggtataaaccatgacattcgggactggcgttaccgccactttcgtggcggtacgttgatgcatcgcgtcaagcaaacgccgtttggtttcggcgctaatgctctgcggtttaccgtgggcattgatgtaattggggctaatccccgccgccagcgcggcattatccagacgtttgctttccatcgagcttccttagcgttttgcctgccagatacgagcctgataatcgcgaatagagcgatcgctgctaaacataccgcagcgggcggtattgaggatcgccgcgcgagtccaggcctcctggtcgcggtacagcacatccacctgcttttgtgcctctacataggctgcgaaatccgccatcaccagatacggatcgccgccctgtttgccgatactgtgcagcatctggtcgaaggcatgcttatcgccgtcgctgtatttaccgctttccagctctttcaatactgcgtccagcaccttatctttcttccgccatttcaccgggtcgtagcctttggccagaattgccttcacttgttccacggtatgaccaaaaataaagatattttcttcaccgactttctcggcgatttcaacgttcgccccatccagcgtaccgacagtaagcgcaccattgagcgccagtttcatattgccggtaccggaagcttctttacctgcagtgctaatttgttcggagatatccgccgccgggatcagtttttccgccgcgctaacgcaataatccggcaggaacaccaccttcaacttatcgccaaccagcggatcgttgttgatcacgtcagccactttgttgatcgcaaagataatattcttcgccaggtagtagcccggtgccgctttcgcgccgaagaggaagacgcgcggtacgcgatcagcctgcgggttttcacgaatttctttgtacaacgccagaatatgcagcagattcaggtgctggcgtttgtactcatgcaaacgtttgatctgaatatcgaaaatcgcctgtggattgatctcaataccggtacgaactttcacaaactccgccagacggactttattcgcctgcttgatctcgcgatattgctgacggaatttcgcatcatcagcgaatttttccagattgatcagctgatcgagatcgttagcccactctttttgcagacttttatccaacagagccgccagtgccgggttgcactgtttgatccagcgacgtggggtaataccgttggtgacgttatggaatttgttcggccatagctggtgatattccgggaacagatctttcaccaccagatcgctgtgcagcgccgcaacaccgttcaccgcgaaaccgccaaccacacacaggttcgccatatgcacttgtttgtcgtgcaccaccgccagtttggcccacactttttcatcgcccggccaggttttctctaccagcgttttaaagcgagtattaatttcgttaataatctgcatgtggcgcggcagtaagcctttcaccagtttcacatcccagcgttccagcgcttctggcatcagggtatggttggtgtaagcgaaagttttgctggtaatggcccaggcgtcatcccagctcatctggtgctcatcgatcagcacgcgcagcagttctggaatcgcgatagttgggtgggtatcgttcagctgaataacttcgtaatccgccagttcgtgcagtttacgccccgccagatgatggcgacgcaaaatatccgctacgctacaggcacactggaagtattgctgcatcaggcgcagctttttaccggcagtatggttgtcgtttggatagagaactttggtcagtttttccgcattgatgccctgctgttcggcacgcaagaaatcaccgtcgttaaatttagtcagatcaaacggatgcgcgtgcgtcgcctgccacagacgcagcggctgcgccacgccattacgatagccgacaacggggagatcccacgcttgaccggtaatggtaaactccggctcccagcgtccgtctttcgtcactttaccgccaatccctacctgcacatccagtgcttcgttgtggcggaaccacgggtagttactgcgatgccagtcatccggcgcttcaacctgtttgccatcgacaaaagactggcggaacaaaccatattgatagttcagaccgtaacccgtcgcagactgaccgacagttgccatactgtcgaggaagcacgccgccagacgtcccagaccaccgttacccagcgccgggtcgatctcttcttccagcaggtccgtcagattgatgtcataagccttcaagctatcctgtacatcctgataccagccgagattcaacaggttgttgcccgtcaggcgaccaatcaaaaactccatactgatgtagttaacatgtcgctgattcgccaccggcttggcgaatggctgagcacgcagcatttcggccagtgcttcactcactgctagccaccactggcgaggagtcatttcagccgcagaatttaagccataacgctgccactgacgactaagcgcttcctgaaattgcttatcgttaaaaataggttgactcataggagttccacttttcttagattttcaacacaacgttatcgctagtttgccaggctcgatgttgaccttcctcatcctgcgggggattaggcagggaggagttgcggggatgagcaaggaaatgtgatctcaaccacttaaagctagtgcaaaccacaggattagcatcaaatcaatgcaatacagcgcagaaaatctgtatctaagtgcaaaaaatggccgttgcgtattttcaaaaagcggaaggtaactctataaattaagtaaaggagtgaaacagtttcataagtaaaatatccagtgtgctccatctcattcttaatagatttattaagatcatctttttagatggcactttcatcaggaatgaagaagaaacccttgcttaaatgaatctgatgaacataagggaaaccagtattcacgctggatcagcgtcgttttaggtgagttgttaataaagatttggaattgtgacacagtgcaaattcagacacataaaaaaacgtcatcgcttgcattagaaaggtttctggccgaccttataaccattaattacgaagcgcaaaaaaaataatatttcctcattttccacagtgaagtgattaactatgctgattccgagtaaactaagtcgtccggttcgactcgaccataccgtggttcgtgagcgcctgctggctaaactttccggcgcgaacaacttccggctggcgctgatcacgagtcctgcgggctacggaaagaccaccctcatttcccagtgggcggcaggcaaaaacgatatcggctggtacagcctggatgaaggtgataaccagcaagagcgtttcgccagctatctcattgccgccgtgcagcaggcaaccaacggtcactgtgcgatatgtgagacgatggcgcaaaaacggcaatatgccagcctgacgagtctcttcgcccagcttttcattgagctggcggaatggcatagcccactttatctggtcatcgatgactatcatctgatcactaatccagtgatccacgagagtatgcgcttctttattcgccatcaaccagaaaatctcaccctggtggtgttgagtcgcaaccttccgcaactgggcattgccaatctgcgtgttcgtgatcaactgctggaaattggcagtcagcaactggcatttacccatcaggaagcgaagcagttttttgattgccgtctgagtagcccgattgaagccgcagaaagcagtcggatttgcgatgacgtttccggttgggcgacggcactacagctaatcgccctctccgcccggcagaatacccacagtgcccataagagcgcacgccgcctggcgggaatcaatgccagccatcttagcgattatctggtcgatgaggttttggataacgtcgatctcgcaacgcgccattttctgttgaaaagcgccattttgcgcagtatgaacgatgccctcatcacccgtgtgaccggcgaagaaaacgggcaaatgcgcctcgaagagattgagcgtcaggggctgtttttacagcggatggatgataccggcgagtggttctgctatcacccgctgtttggtaacttcctgcgccagcgctgccagtgggaactggcggcggagctgccggaaatccaccgtgccgccgcagaaagctggatggcccagggatttcccagcgaagcaattcatcatgcgctggcggcaggcgatgcgctgatgctgcgcgatattctgcttaatcacgcctggagtctgttcaaccatagcgaactgagcctgctggaagagagccttaaggccctgccgtgggacagcttgctggaaaatccgcagttggtgttattgcaggcgtggctgatgcaaagccaacatcgctacggcgaagttaacaccctgctagcccgtgctgaacatgaaatcaaggacatcagagaagacaccatgcacgcagaatttaacgctctgcgcgcccaggtggcgattaacgatggtaatccggatgaagcggaacggctggcaaaactggcactggaagagctgccgccgggctggttctatagccgcattgtggcaaccagcgtgctgggtgaagtgctgcactgcaaaggcgaattgacccgcagtctggcgctaatgcagcaaaccgaacagatggcacgccagcacgatgtctggcactacgctttgtggagtttaatccagcaaagtgaaattctgtttgcccaagggttcctgcaaaccgcgtgggaaacgcaggaaaaagcattccagctgatcaacgagcagcatctggaacagctgccaatgcatgagtttctggtgcgcattcgtgcgcagctgttatgggcctgggcgcggctggatgaagccgaagcgagcgcgcgtagcgggattgaagtcttgagctcttatcagccacagcaacagcttcagtgcctggcaatgttgattcaatgcagcctggcccgtggtgatttagataacgcccgtagccagctgaaccgtctggaaaacctgctggggaatggcaaatatcacagcgactggatctctaacgccaacaaagtccgggtgatttactggcaaatgaccggcgataaagccgccgctgccaactggttgcgtcatacggctaaaccagagtttgcgaacaaccacttcctgcaaggtcaatggcgcaacattgcccgtgcacaaatcttgctgggcgagtttgaaccggcagaaattgttctcgaagaactcaatgaaaatgcccggagtctgcggttgatgagcgatctcaaccgtaacctgttgctgcttaatcaactgtactggcaggccggacgtaaaagtgacgcccagcgcgtgttgctggacgcattaaaactggcgaatcgcaccggatttatcagccattttgtcatcgaaggcgaagcgatggcgcaacaactgcgtcagctgattcagcttaatacgctgccggaactggaacagcatcgcgcgcagcgtattctgcgagaaatcaatcaacatcatcggcataaattcgcccatttcgatgagaatttcgttgaacgtctgctaaatcatcctgaagtacctgaactgatccgcaccagcccgctgacgcaacgtgaatggcaggtactggggctgatctactctggttacagcaatgagcaaattgccggagaactggaagtcgcggcaaccaccatcaaaacgcatatccgcaatctgtatcagaaactcggcgtggcccatcgccaggatgcggtacaacacgcccagcaattgctgaagatgatggggtacggcgtgtaagtttagccggataacgcgccagatccggcttacatctctgcatcattcaatgctcacccgcgttacgccatctgtttctatcaaactaaaccgcaccggcaagaaacgctccaccaccgcgatattggtcagcagatggcaactgggatgggcgaccgtaaattcccccgcgcccgccagcgccatcggtagcaccagttggtcagcaagatattcccccaccgccgccgtgcttgccaggtagcgtttcacctctttcaccaactgtgccgcaaccacctcggcactgacgcgcttttcaccgacgacaaaaaagcgttcggtgatattttcactttcgacttcaaggctgacggtattacccggcccctggtcgcgcggcaggttatgaatattctgttcatgcagggaaaaactccccgccagtgtagcgatttcacgctcagcaacatggcgcggcacaccagctaatagaacttctccacgcatctgcacaatgttcccgcgctcgccaagttgcaaggtgttaaagcttgccacggggctgacttccgttgccaccacaccgcctccggcagggtaaaaaccgtggcgtaacagcgtggtttgctgatgaattcctattttcgccagcagcggctccagcacccggcggataaaatccgcaggcggcgcgctcgggttatcggtgccgccgctcacttcaacacggctaggtccatcggcaaaccacagcgcgggcagcaccgtttgcagcaccagcgtacaacttccggcgctaccgatagcaaagcggtaatcgccgccgcgcacggtgccgggccggaagagcagacgctggctccccagctccgcgccttccacggttgctccgcaaatttccgtcgccgcctttaccgcggtcagatgctggcgcaacagccccggtttcgcccgcccggcacgaatgctggtgatggtaaatggctggccggttatcatgctcaggctcagcgcgctgcgcaggatctgcccgccaccttcgccctgtgcgccatccagcgcaatcatccttttcatcatttatccttttacgcacaccacctgacgcagggtatagataacttccaccagatcgctttgtgccgccatcaccgcatcaatatctttatacgccatcgggatttcgtcgatcacttcggcatctttacggcattccacatgcgcggtggcacgaatttgatcttccacgctgaacagttttttcgctttagttcggctcattacccgcccggcaccgtggctgcagctacagaagctctcttcatttcccagcccacggacgataaagctttttgctcccatgctaccgggaataattccatattgaccagcacgcgcagacaccgcgcctttacgcgtcacgtagatctcttcaccaaagtgctgttctttttgcacatagttgtggtgacagttgatctcttccatcgccagcgtttgtggctgtctgaccgttttctgcgtaatgctctgcaatgccgttaccacgttttccatcatcgcatcgcggttaaggctggcaaaaagctgcgcccaggccacggctttcaggtaatcatcaaagtattccgtaccttccataaagtacgccagatcacggctcggcaacgtctcaagcgtttcctgcatctctttttgtgccagatcgataaagtaagtcccgatggcgttaccaattccgcgactaccggagtgcagcataatccacacctggtcgctctcatcaaggcagatttcaataaagtggttaccggttcccagcgttcccaggtgtttatagttattggtattcaggaaacggggatatttttgcgttaaccactgataaccggcttcaagctcagcccatttagcatcgacgttaacaggtggattttcccaggcacctttatcacgtttacaacggccagtggtacgcccgtgcggcacggccgtttcaatcgcctgacgcagctctgccaggttttcaggcaggtcttccgccgttaacgcggtacgcagcgcgttcattccacagccaatatccacgcccaccgccgccggaataatcgcccctttggtcgggatcacgctaccaatggtggaacctttacccaggtgtacatcaggcattaccgcaatatgtttgaaaataaacggcatcttcgccgtattaataagttgctgacgcgcatcggcctctaccggcacgcctttggtccacatttttaccggggcattttcagtggtcagtaattcgtaattcattttgtttttctcttttcgttgtttgctgtcctgataattgcaaccgtcgtgccagaaaattaaataagcagcttaattttttaattcattgttttaaaaaagattatatctttacgtccgtaaccggagatttcccgcaaagccaatttaccgataatgaaatatcgtcttttataaggatatctaagatgcgtaaaacagtggcttttggctttgtcggtaccgtactggattatgccgggcgcggcagtcagcgctggagtaaatggcgtccgacactctgtttatgccagcaagaaagcttggtcatcgatcgactggaattgttgcacgacgcccgcagccgcagcctatttgaaacgcttaaacgcgatatcgccagcgttagcccagaaacagaagtggtgagcgttgagattgaactgcataacccgtgggatttcgaagaggtctacgcctgcctgcatgatttcgcccgtggttacgagtttcagccagaaaaagaagactatttaattcacatcaccaccggtacccacgtcgcgcagatttgctggtttctgctggcagaagcgcgttacctgcccgcccggctgatacaatctagtcctccgcgcaaaaaagaacagccgcgcggcccaggtgaagtaacgattatcgatctcgatttaagccgttataacgccatcgccagccgctttgccgaggaacgccagcaaacgcttgattttcttaagtccggcattgccacgcgtaacccccacttcaaccgcatgattgagcagatcgaaaaagtggcgatcaaatcccgcgcgccgattctgcttaacggtccaaccggcgcgggcaagagttttctggcgcgacgcatcttagagttaaaacaggcgcggcatcagtttagcggcgcgtttgtggaagtgaactgcgccaccctgcgcggcgataccgccatgagcacgctgtttggtcatgtaaaaggcgcgtttaccggggcgcgggaatctcgtgaaggtttattacgcagcgccaacggcggaatgttgtttcttgatgagattggcgaactgggcgcagacgaacaggcaatgctgctgaaagccattgaagagaaaaccttttacccgtttggcagcgatcgccaggtgagcagtgattttcagcttatcgccggaacggtgcgcgatttgcgccagctggttgccgaaggcaaatttcgcgaagatctgtacgcgcggatcaatctctggaccttcaccctgccgggtctacgccagcgccaggaagatattgaaccgaacctggattatgaagtggagcgccacgccagtctcactggcgacagcgtgcgttttaacaccgaagcgcggcgcgcctggttggcttttgcgacctctccccaggcaacatggcgcggtaactttcgcgaactttctgccagcgtcacgcggatggccacctttgccactagcggacgcatcactctggacgtggttgaagatgagataaaccgtctgcgctataactggcaggagagccgcccctccgcgcttacggcgttgctgggcgcagaggcagaaaacatcgatctcttcgaccgtatgcaactggaacacgttatcgctatctgccgccaggcaaagagcctttccgcagccggacgccagctttttgacgttagccgccagggcaaagccagcgtcaatgacgcggatcggctacgcaaatacctggcgcgttttggtctgacgtgggaagccgtgcaggatcagcacagctccagttgaatatggtggtccgtcagcacctgcatcacgcttactggcggcggggcgtcggtgtagacggcatctaccatgctgatgctgcccatattgaccatcgcgttacggccaaatttcgagtgatcgacaaccagcataacgtggcgcgagttctcaataatggcgcgtttggtgcgaacttcgtggtaatcgaactccagcagcgagccgtcgctatcgatgccgcttatccccagaatgccgaaatcaaggcggaactgggagataaaatcgagcgtcgcttcgccaatgatcccgccatcgcggctgcgtaattcgccaccggcgagaatgatgcgaaaatcttcttttaccatcaacgtgttagcaacgttgagattgttggtgacaatgcgcaaattgctgtgattgagcagtgcgtgcgctaccgcttccggcgtggtgccgatatcgataaacagcgtcgagccattggggatttgctccgccactttgcgggcgatgcgctctttttcttcggtctgggtggccttgcgatcgtgccacggcgtgttaaccgaactggaaggcagcgccgcaccgccatgatggccaggatcaggttttgctccgccagctcattgaggtcgcggcgaatagtctgcgggctgacggagaaatgctctaccagctcttcggtactgacataaccctgctgtttaaccagttcgataataccgttgtgacgttgtgtttgtttcatttataaatccctggaattattttcgttttcgcgcattgaggctatcaacaaaagccatcgctaaacccacggctaacccggcgatgtgtgctccgttcgccatgctcatcccaaacaaatcaaaccatccggcgacaatccagatcagcgcaaagataattaacccacgttgcaggtaaatgccactttgcggatcgcgttcgccacgtagccagacgtagcccatcagcgcatacaccacgccagaaagcccgccaaaccacggcccgctgaatttttgctgcacatagccgcttaacagggcgctgataagcgtaatgacaattagcttaccgctaccgaggcgtttttccaccgcaccgccgagataccaccaccagagcaggttaaagaggatatgcatcaggctgaagtgcattaacgcgtgggtgaagtaacgccagaactcaaatttcagtgttggatcgaatggccaggccagccataacatcacttcctgatcgccgagaatttgcatggcaataaacaccaccacgcaggcgatcatcatcacccaggttaccggacctgcgcgttcacgcaaggcggcaaagaaaggataacggcgataatgcaggccactgccggtatggcctgcctgccagctcgccgccagataacgcggatctgccgggttttcgagaaaacgcgccagctccgcccgtacgcgctcggcctgggactcatccgccagccagacatcgctttggttatgttgttgaatcgtgaggataacaccctgcgtcgccatgtaatcaacaaacgcctgcgccacgcgggggttagcaaaagaggtaatcatcaacatcgttgctgtcgcttattccacacaaaaggggacagtataaagcgttacgcgccgtacgccacctctgcgggaaactgacgttgccaggcttcaaagccgccgtcaatgctatagaccacatcgtagccctgttgcagcagatactgcgccgcgcctttgctgctattgccgtgataacacatcaccatcaccggagtgtcaaagtcgttatcacgcataaaagcgcccagcgtgtcgttggttaaatggaaagcctgcaccgcatgtcccattgcgaaactctgtggatcgcgaatatcgaccagcaccgcctctttttcctgcaacttctggtgcgcgtcggcaacgttaatacattcgaactgatccatgcgtctctctttctttacaaacaagtgggcaaatttaccgcacagtttacgtcgaagcggcagataaacgccataatgttatacatatcactctaaaatgttttttcaatgttacctaaagcgcgattctttgctaatatgttcgataacgaacatttatgagctttaacgaaagtgaatgagggcagcatggaaaccaaagatctgattgtgatagggggcggcatcaatggtgctggtatcgcggcagacgccgctggacgcggtttatccgtgctgatgctggaggcgcaggatctcgcttgcgcgacctcttccgccagtagtaaactcattcacggtggcctgcgctaccttgagcactatgaattccgcctggtcagcgaggcgctggctgaacgtgaagtgctgctgaaaatggccccgcatatcgccttcccgatgcgttttcgcctgccacatcgtccgcatctgcgcccggcgtggatgattcgcattggtctgtttatgtacgatcatctgggtaaacgcaccagcttgccgggaagtactggtttgcgttttggcgcaaatagtgtgttaaaaccggaaattaagcgcggattcgaatattctgactgttgggtagacgacgcccgtctggtactcgccaacgcccagatggtggtgcgtaaaggcggcgaagtgcttactcggactcgcgccacctctgctcgccgcgaaaacggcctgtggattgtggaagcggaagatatcgataccggcaaaaaatatagctggcaagcgcgcggcttggttaacgccaccggcccgtgggtgaaacagttcttcgacgacgggatgcatctgcctagcccttatggcattcgcctgatcaaaggcagccatattgtggtgccgcgcgtgcatacccagaagcaagcctacattctgcaaaacgaagataaacgtattgtgttcgtgatcccgtggatggacgagttttccatcatcggcactaccgatgtcgagtacaaaggcgatccgaaagcggtgaagattgaagagagtgaaatcaattacctgctgaatgtgtataacacgcactttaaaaagcagttaagccgtgacgatatcgtctggacctactccggtgtgcgtccgctgtgtgatgatgagtccgacagcccgcaggctattacccgtgattacacccttgatattcatgatgaaaatggcaaagcaccgctgctgagcgtattcggcggtaagctgaccacctaccgaaaactggcggaacatgcgctggaaaaactaacgccgtattatcagggtattggcccggcatggacgaaagagagtgtgctaccgggtggcgccattgaaggcgaccgcgacgattatgccgctcgcctgcgccgccgctatccgttcctgactgaaagcctggcgcgtcattacgctcgcacttacggcagcaacagcgagctgctgctcggcaatgcgggaacggtaagcgatctcggggaagatttcggtcatgagttctacgaagcggagctgaaatacctggtggatcacgaatgggtccgccgcgccgacgacgccctgtggcgtcgcacaaaacaaggcatgtggctaaatgcggatcaacaatctcgtgtgagtcagtggctggtggagtatacgcagcagaggttaagcctggcgagctaaattaacgtaaggtgatcaggtcagatttcaatctggcctgagactgatgacaaacacaaaactgcctgatgcgctacgcttatcaggcctacgtggtttatgcaatatattgaatttgcatggtcttgtaggccagataagacgttcacgtcgcatccggcatgaacaaagcgcactttgtcaaaaatctaacctactttttaattcagggaattaccgcaaagcccacgccatcatacccaacgtaacaaaactcaggcacgttccccactcgcccgctgaaaaatagcattaatgcgcccagcgccagcataaaaattttgagcagaaggtaaattgttggcgtgataaggatattacaaacttcaataataccggcaagtccgacacccagcatggcaataaccaccgccaaaaattgcgccagtatggggatgccgaaaaaagtcattaccaggctggtcaaaatccattttctgttttgcattattctttccattctttttgaatggtgaaattatactccccgagtccccttgccccttctggacacttttccgaaatgatggcggaaaaaaacgggaccctttggccccgttctatttattggtgaacttacaatctcaccggatcgatatgccagatatgatcggcgtactctttgatagtacggtcagaagagaagtagcccatattggcaatgttcagcatcgcttttgcggtccactcttcctgaagctcgtagagttcatcgactttatcctgacaatcgacatagctgcgataatccgccagtacctggtagtgatcgccgaagttgatcaggctatcaaccagatcgcgatagcgacccggatcttccggactgaatacaccgctgccgatttgcgtcagcacctgatgcagctcctcatctttctcgtagtattcacgcggtttgtagccctgacgacgcagttcttccacttcttccgctgtgttaccaaaaataaagatattgtcagcaccgacatgatccagcatctcgacattcgcaccgtccaacgtaccgatagtcagcgcaccgttaagcgcaaacttcatgttactggtgccggaagcttccgtccctgccaggctaatctgttcagacagatctgccgccggaatgatcaactgcgccaggctaacgctgtagttcgggatgaacacgactttcagcttatcgccaatctgcggatcgttgttgatcactttcgctacgtcattgatcaaatgaataatgtgcttcgccatgtaataggcgctagccgccttaccgccaaaaatattcacgcgcggtacccacttcgcatccgggtcggccttgatgcggttatagcgggtaatcacatgcaacacattcatcaattgacgtttgtattcgtgaatacgtttgatttgtacatcgaacaacgcctttggattcaccaccacattcagctgctgggcgatatactctgccagacgctttttgttctccagcttcgcctgatgcacagcgtgattaaccattgggaaatcacagtgttgttgcagctcattaagcaggctaaggtcggtgcgccagttacggcccaggtgttcgtccagcacggcactaaggcttgggttcgctaccgccagccagcgacgcggcgtcacaccgttggtgacgttggtgaaacgacccgggaagattttcgcaaagtcggcaaacaagctttgcaccatcagattagagtgcagttcgcttacaccgttaactttgtggctcacaacaaccgccagccaggccatacgcacacgacgaccgttggattcatcaatgatgctcgcccgtcccagcagatcggtatcgttcggatactgttcctgcaaggttttcaggaaatagtcgttgatttcaaagatgatctgcaggtgacgcggcagaattttacccagcatatcaaccggccaggtttccagcgcctcgctcatcagcgtgtggttagtgtaggagaagacctgacaacacacctcaaacgcgtcgtcccagctaaattggtgctcatcgatcagcagacgcatcatctcaggaatgctcagtaccggatgggtatcattgagatgaatcgcgattttatccgccaggttatcgtaggttttatgcaactgataatggcggcttaaaatgtcctgaatggtgctggaaaccaggaagtattcctgacgcaggcgcagctcacgcccggagtaggtggagtcatccggatacagtacgcgagatacgttctcggagtggtttttatcttccactgccgcgaagtagtcaccctggttgaatttaccgaggttaatttcgctactggcttgcgcactccacaaacgcagcgtgttggtcgcgtcggtgtcgtaaccagggattatctgatcgtaagcgactcccagaatctcttcggtttcaatccagcgcgtttttttaccttcctgctgaatgcgaccgccaaaacggactttatagcgcgtgttgtggcgtttgaattcccacgggttaccgtattccagccagtagtctgggctctctttctggctaccgttaacgatgttctgcttgaacataccgtagtcatagcggatgccgtaaccgcgccccggcaaccctaacgtcgccagagaatcaaggaagcaagccgccagacgtcccaggccaccgttaccgaggcctgggtcattttcttcatcaatcagctcttcgagatttaaccccatcgcttccagtgcgccctgtacatcttcgtaaattcctaggctcaacatggcgttggagagcgtacggccaatcaaaaactccatgctcaggtagtaaacctgacgagtttcttggctcaactgggcacggttactacgtaaccagcgctccacgagacgatcgcgcacagcaaataacgttgcgttcagccattcatgtttattggcgacgaccgggtcctttccaatcgtaaacatcagcttgtaagcgatagagtgcttaagagcttctacgctaagcgtggggctactatatgtaaacggagcattcatataggcgtttcctgaaaattatttcaagcgatagtaaagctcacggtagctcttcgccgcgacctgccagctaaaatccattgccatagcctgacgttgcacaaaccgccacagactaggacgggaccacagtacaaaagcacgtcgaatagcccgtaacaggctccaggcattactatcttcaaagacaaacccactggcgacgccatctgcaaggttctcaagagaacagtcagaaaccgtatcagcaagcccaccggtgcgccgcactaacggcagcgtaccgtacttcaatccataaagttgcgttaagccgcacggttcaaaacggctgggcaccagaatgacgtccgcgccgcccataatgcgatggctaaatgcttcgtgatagccaatctgaacgcccacctgaccggggtattccgctgccgccgcaaggaaaccttcctgcagcaccggatcgcccgcgccgagtagcgccagctgcccgccctgctccagaagacccggtaaggcttccagcaccaggtcgagacctttctggctggtcagacggctcaccactgcaaaaagcggcactttatcgtcaaccttaagccccattgcgatttgtaactggcgcttattttccgctttatcttccaacgtatcgcgggtgtaacggctggccaacagtaagtccgtctctggactccagattttctcgtccacgccgttcagtacgccggaaagacgcccttcacggtgacgctgttgcaacagaccttccataccgtaggcaaactgcggttcggtgatctcgcgagcgtaggttggactgaccgccgtaatgtgatcggcatagtacagaccggccttcaggaaagagatttgtccgttgaattccagcccatgaatattaaagaaactccatggcaattggatgtcattcatgtgatgtgcataaaacatgccttgataggccaggttgtgcacagtaaacacgctcttcgccggacgcccgcgcgccgccagatacgcaggcgcaaggcctgcatgccagtcgtgcgcatgcaccacatcaggacgccagaatgggtcaagcccgctggccatttctgccccaacccaccccagcagcgcaaaacgcaatacgttgtcggtataggcaaataagttggtatcgtgatacgggcttcccggacgatcatagagatgcggcgcgtcaatcaggtaaatgccaaccccgttgtaatgaccgaacaacagcgtgatatgtccggcgaaggtatcacgacgggatactacctgcgcatcggtcacgccacggcgaatatcgggaaatgcaggcaacagtacgcgagcgtcaacgccgtctgcgatttgtgctgcgggtaatgccccaataacatcagccagaccgccggttttaagcagcgggaacatctcactacatacatgtaaaacctgcattatcgctcctgtttatgccctaacttccgtagcatttcgcgcgttaccagcacgatgccttcttcactacgatagaaacgacgtgcatcttcctctgcgttttcaccaatcaccatgccttccggaataacacaagcacgatcgatgacgcagcggcgcagacggcagctgcgacctacccatacttccggtaacaatacggcggaatcaatgttgcagaaactattcacgcgaacgcggctgaacagaacggactgcaccaccacgctaccggagatcacacaaccgccggaaaccagactgttaagggtcatcccgtggctaccggagcgatcctgcacgaatttcgctggcggtaaactttcattgtaggtgcgaattggccaattgcgatcgtacatatccagttccggcaccacagaggccagatcgaggttcgctttccagtaagcttccagcgtacccacatcgcgccagtacggctcggcatccgggtcggattgtacgcaagagagcgggaacgggtgcgcataggccagaccggcttcggtgatcttgggaatcaaatctttgccaaagtcgtggctggagttctcatcgcgatcgtcttcttccagcagttcatacagatagtcggcgtcaaagacgtagatacccatactcgccagagatttgctcggatcgttcggcatactcggcgggttagcaggtttttcaacgaattcgataattttatcgttctcatcaaccgccataacgccaaatgcggaggcttcttcaatcggtactggcatacaagcaacggtgcaacgtgcgcctttttcgacgtgatcgataagcatacggctgtagtcttgcttgtagatatggtcgcccgccaggatcaccacgtattccgctttataacggcggataatgtcgaggttttgggtgaccgcatctgcggtgccgcgataccagttttcccctttcattctctgctgtgctggcagcagatcgacaaactcgttcatttcttcattgaagaaactccagccgcgctgaatgtgctgcaccagagtgtgggactggtactgggtgatcacgcccatacgacggatcccggagttgatgcagttagacagcgcaaagtcgataatgcggaacttaccgccgaagtgtacggccggttttgctcgcttattggttaaatccttcaggcgggtaccacgtcctcccgccagtatcagggcaacagatttcaatggcagctggcgcgccaacattaagtgatcgttcttctctaaactaaccatgactaactccttttttatcatctctggaacacacacaatccgtgtgcaggtccctgccagacagccgtaatcactgggttatcctctccagcgaatgggggaatggcgtgccactccccagcaggtaaaacaatctctgttacctcaagcgtggcgttaattgcgatcaaaaagcgatcgctgagcagaatttgcagctgtttcggcccgttttgccactcatccgtgcttaaaggttgagcatatcgatttagccaacggacattgccgtcgccttcttcccaccagcgattctccaccaaagcgggaatgcgcttgcgcagatggattaacgcggcggtaaatgcggttaaaccactgcttgcctggctccagtccaaccaggttaattggttatcctgacagtaggcattgttattgccatgctggctgtgaccatgttcgtcaccggccagtaacatcggcgtaccctgggagagcaacaacgttgttaacagggcgtgaatgctgtcgcgccgccgttcaaccaggtcaagagaaccgcctaacccttctttaccatgattgttactgtaattgttgttggtcccgtcgcgattttcttctccgtttgcttcattgtgtttatggttgaagcaaacgcagtcgcgaagcgtaaaaccgtcatgcgcggtgacgagattaatcgcggcactcggcagacgaccattacgtttaaaaacatcgctggaggcagcaaaacgcccggcaaacgcccccagaggcaaatcataatgtagccagaaacgacgggcagcatcgcggaaatgatcgttccactcggcaaacagcggcgggaaatttcccacctgataaccaccaggagcgatatcccacggttcagcaattaacttcacctggctgagcaccgggcagttctggatagcggtaaacaacggcgcatcctgacggaactctggcgtacggcccatgactgccgccagatcaaagcggaaaccatcgacgtggcaggtttctacccaataacgcaggcaggcgctggcataatccaccaccgccggatgactcaaattgagcgtgttgccgcaaccggtccagttgtgataatcgccgtcttctcttatccaataatagctacggttatcgatcccacgcaggctgaataacgggccgtcgaggtccagttccgcactatggttgagcacgatatcaagaatgacttcgatacccgctttatgcagtgctttgattgcatcgcgaaactcatccagcgccgtttctgggctgcaggcatacgccggatgcagcgcaaacatcgccaccgggttgtaaccccagtagttacttagccccatgcgttgcagacgtggttcactggcaaactgcgccactggcagcagttccagcgcggtaatgcccaattgtttcaaatagttgatcatcaccggatgcccgagggctttataagtgccacggatctcgaccgggatctccgggtgcaagtacgttaatcctttgacatgggcttcataaatgatggtgctgccccacggcgtgcgcggcggggcatcatcttcccagtcatagtgatcaaccaccactacgcatttcggcgcaatggcggcgttgtcgcgatagtcaggttcattatgaccggcgtgcagcagcgggttatctttaaactccccgtcaatttgccgcgcgcaaggatcaatcaacaacttcgccgggttaaagcgatgcccctcggcgggttgccaggggccatgaacgcgataaccataacgcaaacccgggcgcgcatccggcagataaccgtgccaaatgtcgccactgtgccctggcaagtcatagcgatgttcctggccattggcgtcaaagacacacagttctacccgctcggcatgagcggagaaaagtgtgaagttgacgccctgaccgtcgtaatgcgcgccgaggggagcgggtttgccaatggcgagttgtgtcattctgcctcccgaaccagccagatagtggccagcggtggtagcgtcaggcttagactatgctgacgaccgtggctggcaatctcatcgctgtgtaccgtgccgccattgcctgcattactgccgtgatagtgcatggaatcggtattgaggatttcacgccatttgcccggctggtttatgccgaagcgataatcatgacgcggtaccggcgtaaagttactggcaacgatgatttcgttaccctctttatcgcgacgcacaaagatcagcacgctgcgttctttgtcatccaccaccagccattcaaagccgtacgggtcaaaatccagttcatgcattgctttatggtggcggtaggtgaggttcagatcgcgcaccagacgctggacaccgtggtgccagttatcgccgccttccaacagatgccagtcgaggctggcgtcatggttccactcgcggccctgggcaaattcgttacccatgaacagtagtttcttgcccgggaatgcccacatccagccatagtaggcgcgcaggttcgcgaatttctgccatgcgtcgcccggcatgcggtcgagaatgctttttttaccgtggaccacttcatcatggctcaacggcaggacgaagttttcagtgtagttgtagagaatcccgaaggtcagtttatcgtgatgatactgacgataaaccgggtcgagcttcatgtagtccagggtgtcatgcatccagccgaggttccacttgtaccagaagcccagaccgcccatatcctgcggacgagaaacgccagggaaatcggtagactcctcagccattgtcaccgcaccggaaacctgctcaccaagaatacggttggtattacgcaagaattcaatcgcttcaagattctcgcgcccgccaaattcgttcgggatccactccccctctttacggctgtagtcgcgataaatcatactcgccaccgcatcgacgcgcagcgcatcaataccaaaacgttcaatccagtaaagcgcgttaccgacgaggaagttactgacttcacggcgaccatagttgtagatcagcgtgttccagtcctgatgatagccttcacgcggatcgctgtgttcatacaagttcgtgccatcaaattcggcaagcgcaaagtcatcagtcgggaagtggcctggcacccagtcgagaatcacgttcagaccagctgcgtgtgcggcatcaatgaaataacggaagtcgtcgcgagtaccaaaacggcgggttggcgcatacaggccggttggctgataaccccaactgccatcgaagggatgctcgttaatgggcagtagttcgaggtgggtaaagcccatccatttagcataaggcaccagttgatcggccagctcgcggtagctcaaccagaaattgttgtcggtgtggcgacgccaggaacccaggtgaacttcataaatagagattggcgcatcaaactgattcgcttttttgcgctcttcagtctgtacaaccttttccggcagcccgcaaataagagacgcggtttccgggcgcatttgcgcttcaaaggcataagggtcggacttcagacgcaagttgccattggcatcaatcatctcgtatttatagagctgaccgttatgcgccccagggataaacagttcccagatgccgctctctttacgcaggcgcatcgggtgacggcgaccgtcccagtagttgaattgcccaaccacgctgacccgacgggcgtttggagcccagacagagaaacgcgtacctgtgacgccatccatagtatctgcatgcgcgcctaaggtttcatacgggcgcaggtgagtaccttcagataatagccaggcatccatttcctggattagcggaccaaaacggtaaggatcatcaatcaggttttgctgaccatgccagacaacagccaactgatagcggaaaaaattcttacgtcgcggaatgacgccgctaaagaatccccgactgtcgagacactccagttttgcgagtttgcgcccggttttcggttcaatcacccacacatcggtagcgtcgggtaaaagggcacggacttccagtcccgcggtggttttatgcattcccagtacggaaaaaggatccgcaaaatggcctgcaattagcgcgttaatcacgtctctatcgatacgatcggacatgcttgtcttcctgttttattgtgtcaccccatccaattggatttttgacttctggttgtgacatttttttgacctgaacggcgcagcactctgtgcatcctctctgcgtcgtcctcacttcaggtaaggctgtgaatactcatgtattcagccacccttaaagaatagccaatgctctatttaactcccggtaaatcatgaaacatctgcgcttactcctgtattacgcactaacaggggcggcatcgcgccccagatttaatgaataaagattacgccagttgacgaagcatccgacgcagcggctccgcggccccccacagcagctggtcgcccacggtaaaggcactcaggaactctggtcccatattcagcttacgcaggcggcctaccggcgtggtcagcgtgccggtaacggcagctggggttagctcacgcatagtgatttcccgatcgttcggaacgactttcgcccacggattgtgcgcagccagcagttcttccacggtcggaatagacacatcttttttcaatttaatagtgaatgcctggctgtggcagcgcaatgccccgacacgcacacataaaccatctaccggaattacggaagatgtgttgaggatcttgttggtttccgcctgccctttccactcttcgcggctctgaccgttatcgagctgtttgtcgatccacggaatcaggctacccgccagcggcacgccaaagttatccaccggcagctcaccgctacgggttaaggttgtgactttgcgttcgatatcgagaatagcagaggacggggtcgcgagttcatctgccacatggccatacagatggcccatctgggttaataactcacgcatatgtcgcgcaccaccgccggaagcggcctggtaggttgcaacggacacccaatcaacaagatcattggcgaataaaccacccaagctcatcaacatcaggcttacggtacagttaccgccaacaaaagtcctgatgccattatttaatccgtcggtaatgacgtcctgattgacggggtcaagaatgatgatggcgtcatctttcatgcgcagagagcttgctgcgtcaatccagtaaccttgccatccgctttcacgaagctttggatagatttcgttggtataatcgccgccctgacaggtcacaatgatatcgagggcctttagcgcctccagatcaaaggcatcctgaagtgtgccagtggttccgccaaaagacggcgcagcctggccaagctgagaagtagaaaagaagacagggcgaatggcgtcgaagtcgcgctcttcaaccatgcgttgcatgagaacggagccgaccataccgcgccagccgataaaaccaacatttttcataagcgtttttttcctgcaaagatgtgtgctgtataaatgtgccggtctcctcttggcacatctttcaccatacaaaaagcagccaaagtcgcaagtgaaattaatcaatgatagcgaagccatcagtaatgcgacttatcctgctttgttagcacgcagaaagtccgcggcaattatcagggaatttgagttatgaatgaaatcatttctgcagcagttttattgatcctgattatggatccgctcggaaacctacctattttcatgtccgtactgaaacatactgaaccgaaaagacggcgggcaatcatggtgcgagagttgcttattgctctcctggtgatgctggtgttcctgtttgcgggtgagaaaattctggcatttcttagcctacgagcagaaaccgtctccatttctggcggcatcattctgtttctgatcgccattaaaatgattttccccagcgctagtggaaatagcagcgggcttccggcaggtgaagagccatttatcgtgccgttggcaattccgttagtcgccgggccgactattctcgccacgctgatgttgttgtctcatcagtacccgaatcagatggggcatctggtgattgctctgctgctggcctggggcggcacctttgtcatcctgctacagtctagcctatttttacgtctgctgggcgagaaaggggtgaacgcacttgaacgcctgatgggattgattctggtgatgatggcaacccagatgttcctcgacggcattcgaatgtggatgaaggggtaacgaggagagtttttcgaaaagaacccggtagcgtcacaactaccgggcgaacaaacttaactcaacagctggaacgcaatcatcccaacgatggcaccgacagtgccgaggatggtttccatcatggtccaggttttcagcgtttcggcttcggtcgcgccggtaaatttaccgaacaaccagaaaccggcgtcgttaacgtggctgacaacaatgctaccaccagcgatacaaatgctcagcgccgccatttgcgcaccggagtagttcagttgttcaataaccggcatcaccagtcctaccgccgttaaacaggctacggtggcagaaccctgaatgatgcgcactgcagctgccagcacgaagcaggtgatagcaatcggcaggcccatgccggttaacgcttcgcccagtgccggacctacgccagagtcaaccagcacctgtttgaacacgccgcccgcaccaatcaccagcagaatgatccccgccggttgcagcgcgtgaccgcaaatctccatcactttgtcttttggcatgccctgacgcattgccagaccgtaaatcgccaccagacaagcaaccagaatcgcggtaaacggatgaccgataaactcaaaccattcgtaagcagtacttccttccggcacaaaacgcgcggcaatggttttcagccctaccagcaccagcggcagcaggatcaggctcaggctgaatccgaaagatggcattttgccttcgccgagatgcggttcgctgatgtcgtcaggaatatgcagctcaacgtaacggctgatgaagttaccccacagcggcccggcaataatcattcccggaattgccgcacacaggccaatcaggatcatccagccaaagtcggcattcatctggcttgccagcagcatcggcgctggtccaggcaccagaaatgccgccgctgccgccacgcctgcaaataatgggattaccagcttcaccaggttcgtaccggtgtggcgcgccatactgaaagcaacgctaatcagcagaactatcgccacttcaaagaacagcggtagcgcacagaccagccccgcaaggccgatggcataatgcgcgcggctgtgaccgaaggatttgagcattttgacggcaatctgatcgactgcgccggtttcatgtaagatcttgccaaacatagctcccagggcgacaaccaccgccaggaagccgagggtgcctcccatccctttttccatcgtcgctgcgattttatcgagcggcataccagaaaaaaggccagcccccatggacaccaccattaaagccaggaaagcgtgcatacgcgccttcatgactaaaaacagcagcagtaaaacagaccctactgctgttaaaacaagcgttaatgtagtcactacttatttgccttttttaataacctcaatggtgcttgccacaacaccttccagcggttgatcgatatccaccaccagtacatcggtttcgtccgcacccggctcctgcagcgtttcaaactgcgtcaccaacatttgggttttaaagaaatggcctttgcgcgctttcaggcggatttcaatcacatcaaaatcgcctttcaaatagatgaaagagagattcggattaccttcacgcagcaagtcgcgatagtgttttttcaatgcagaacagacgatcaggctcactttattagtgcgctgcatagcaaacgcggcgtcgttcagcgcctgcaaccacggtttgcgatcgtcgtcattcagtggttcgccagacgccattttttcgatattgcgccgtggatggaggaaatcgccatcaagaaacgcggcatgaagttgatgcgccacttcactggcgaccgcagatttgccgctgccgcttacgcccatcaagacgtaaatgtggtgatcatggttagtcgtgctcaaagtggtgcccccacaatacaagaattaaaaatgttacgggtaactgttatcggtaacattgtccagccggacaatatcagaagcaatatccatccatgccttaagtgtataagtgtgagctacttcaaatttgtgggcttaaatagatccgcccggactcaaggtgaaacctaaatctaacattttcggtgtcacagattcgccacgaatacgcgccagcaggcgttcagcgccaatactgcccatccgctcacgcggcgtcagcacgctcgcaagtcgtggctccatcacctgaccaatgtcatgaccgtggaaaccggcaatcgccatatcgtcaggaacttttaaccccagacgctgacattcaaacgccgcgccgaccgccaggtcatcattcgtacagaacacgccatccagctgcggatattcccgccgcgcctggcgaatcagttcaataccggaagagtaagaagaagattgctcaaccatcacgctatatggcaccaggcctgcatccagcatcgcctgttcgtatcccttctgtttgatgatagtacgttcgtcgagacgtgcgccgagataggcaatgtggcgatgcccgcgagcaataatggcagtggtcatctggcgtgctgcttcaaagttatcaaaaccgacggcgatatcaaggcatgggctcttgctgtccatcagttccaccacgggaatacccgccacttcaatcatctttaaggtgcgcggcgtgtgggtacgttcggtgaggatcaggccgtcgatattccaggagagcatggattcgaggcgttcttgctccatttccggtttataaccgtagtgcgccagcatggtctgataaccgtgcgcgtcggtgacgctttcgattccgcgtaatacttccgcgaaaacctggttggtgagagaaggtaacaggacgccaatcgcccggctggtggcgttagagaggatatcgggcgcacgattgggaatatagcccagttcatcaagagccgcggcaatcttgccgcgtagagcgacggaaacctgctccgggttgcgtaaaaaacggctgaccgtcattttggtcacgcctacacggtcagccacatcctgaagtacgggtcttttctttttcatcgtcctgaaggtacaaaagagatagattctcttagtttaacacggacacatcagaaccttcccggggaaaacagtgcttgtttacaattattagatatacactaaatcaattgcatcgcattgtgctaacgacgcggcaaaaccccggaagcgtacatcagcacgcgaccggagcgagcgaggaagcctgcaaaaaggcaggcttcaaagatgccgttgagttttaaaccggcggcagatcgaacagtaacacttcgctgtcgctatccgcatggatggagattgcctgctcatcccagattgccagaccatcgctggtgctggctttcacgccgttaatggtgacattgcctttcaccacctggatccagacgcggcgttcagcggcaatctgatgcacgctctgctcatctttcagcaacgcccagcggtacagttccatatcctgatgcactttcaaactaccatctcgcgcatccgggctgagcaccagctgtttgccctgtacggcatcgaagcgacgctgttcataacgcggcgtaataccgttttcttcaggcatgatccagatctgatacagatgcagacgctcggtgctgcttgggttgtactcactgtgacgaatacccgtaccagcactcataatctggaactcacccgccggaacctgctctttattgcccatgctgtcctgatgctcaacagtaccttccagcacgtaggtcaaaatttccatatctttatgcgggtgagtgccgaagccctgccctgcttcaatcacgtcgtcgttaatcacgcgcagcgcggagaagcccataaagttcggatcgtaatagttggcaaaagagaaagtatgccaggagtccagccagccatgatttgcatgaccacgttcatttgctttgcgtaagtagatcatttgtattcgccccctgaatgatttcgatgggcttagtgtggacccgatctgcctgggatgatagagggtgaaaattgacccctctgttcaaaaaaattgaactattcgaggggccatcaaacttacttagcgagagttactgtggagggagaggcttgctcaaatccgcgttcaaggatttccagattggtaagaacttcagattccttgacgtaatttggcgcaccgtgggtgatggtttgatacaacgcatcataaacgcgcccgtaatcgcccatctccggcttcatctcttctctgaccgtcacgccctcgtcattgacatactccagcacaccgacgctatcatccgctgcgaatcccggttcgcccggcataatattagccttcaggctggtttcctgctggtcgataccgtatttaataaagctacctttcttaccgtgaacgataaatttcggataatcgattttcaccagatggctggttttgacgatggctttcaggtcgccataaaacagttgcgcttcaaaggtgtcgtcaggattggctttattacgcaggctgcggatgtcataagcgacgtgatccgggcgaccgaacagagaaataatctggtccatcgtatgcacaccaaggccataaaacgcgccatcctgcggcagcccaggtttggtttctgccaccgggcggtaatagtcaaaatggctttccacttcaacaatctctcccaacttgccactttcaatcgcttttttcgctgtcaggaagcaggagtcaaagcgacgattctgatacggcgtgacggtcagccctttgcttttcgccaacgcaaacagctctttcgcctgcgcaagtgtcggagtgaacggtttttcgaccagcacatttttcccggcttccagcgcgcgtttcgcgtactcgaaatggctgtccgcgtgggtgcagacaacaaccagcttaacatcgggatcgtttagtacttcgtcgagatcgctggtgaaatggatatgggaataaatgggagcctgttcttccggcttcgcatggcgacgaaaaatatgcgcgacatgccagctatccttgcggttaagtacatacggcagatggtaacgggtggtgcttttgccgaagccaataaaggcgcagttgatgaccatgatttcgtcctttttaaggtggttatttacaccttagcgcaaagcggacgtggttcctactggagtgcgcataacgaacacaagcactcccgtggataaattgagaacgaaagatcaaaaaaaaagccagcacccggctggctaagtaatactggaagcaatgtgagcaatgtcgtgctttcaggttctccgcgagggtcttcctgatcgcgagacaataataatcattctcattcgcacttgtccaacactttttgcaaaaaaatgcatttgactcgcatttgaaagtcaatgatgttgaaagggacatttaccccaaagaggacaaaggaacaaatgctcttcccacgaagagggccgctaaccttagtaccccgccgttaaatcatccacgctgcgcgggtcggatgcgccgtacaactcaccgtccggcccaaccataatgctttgtgtactgcccatcgcctctttcagcgccactttctgaccttttgcttccagcagcttgagcgtatccgggctaaaccctttttcgacacgcagctcgtccggcaaccactgatggtggaaacgcggcgcattggtcgcttcggcgacgttcaagccataatcgatgctattcaccaccatttgcagcactgtagtgatgatccggctaccgcctgggctaccggtaaccagccaggttttaccgtctttcaccacaatggtcgggctcatgctgctcagcgggcgtttgttcggcccgacggcgttggcatcaccgcccaccagcccgtaaacgttcggtacgcccggtttggcggagaaatcatccatctggttattaagcagaataccgctctcgcccgcgacaatgcccgtaccgaaggtggtgttcagcgtataggtcaccgccaccgcgttaccatctttatccaccacactgtaatgggtagtttgattactctcataaggcgcaagcttgccggggcgaatttcgctggatggcttcgctttattgatatcaatttgatcggcaatagatttggcataggctttattggtcagcgcctgccacggtactttgacaaaatccgggtcgccaagatattcgctgcggtcggcgtaggcgtatttctccgcttctgccatgatttgcatcgcatcggcgctgccaaagccgtatttcttcatatcgaagttttccagaatattgaggatttgtacgatatggatcccgccggaggatggcggtggcatggagtaaacctgatacccgcgataatcgccgcttatcggagtgcgttcgaccgctttataggctgctaaatcttctttagtgatcaagccaccgtttttctgcatctcctgggcgatctgttccgcaatcgtgcctttatagaattcgtccgggccgttttcagcaatcatctccaggctctttgccaggttcgcctgcaccagcgtgtcgccctttttcagcggctcgccctctttccagaagatagctttactgttttcgtgattcggcaacacttcgctaccgtaggttttgagatcgtcagccagcgcgtcgttaacgataaaaccatcgcgtgccagtttaaacgcgggctgcacgactttgttcagcggcatggtgccgtatttatccagcgccaggctgaaacctgctaccgtacccggtgtgccggaagccagatggctagtgagactttttttgctgtccgggttgccctgatcatcgaggaacatatcgcgggtcgctttggcgggtgccatttcgcggaaatcgatagccgtggtattgccatttttgctgcggattaacataaaaccaccaccgcccagattccctgcctgcggatgcgttaccgccagcgcgtagcccaccgccacggcggcatcaacggcattcccgccctccttgagaatatccacccccacctgagtggcagtggcgtccacagacgctaccattccctgtttcgcgcgtaccgggtggaagacatcttcctccacaccatagctgacgggcggcgcaggaggcgcggcggcggcgctaaaacaacttccactgagcagagcagcaatggccacccggcgtaaaaacgtcggttttatcatcgttattctccagagattaaggggcaaccccagctaagcctggtatataactctgaattaatcatcgttttgtcgggaagcgagtaaacttaaaggatatcttcagaggaggatacgcgatgaaacgacttctgattcttacggcactcctgccgtttgtcggctttgcacagcccattaatactctgaacaaccctaaccagccggggtatcagatacccagccagcagcggatgcaaacccagatgcagactcagcaaatccagcaaaaagggatgctgaatcagcaactgaaaacgcaaactcagttgcaacagcagcatttagaaaaccagataaacaataattctcagcgggtgttgcagagtcagccgggggagcgaaatcccgcccggcagcaaatgctgcccaacaccaacggcgggatgttaaacagcaaccgtaatccggatagtagcttgaatcagcagcatatgctgccggagaggagaaacggcgacatgctgaatcagcccagcacgccgcagcctgacattccgttgaaaactattgggccgtaattattgggccgtaaagttcggaccaatcacgtcaatcgcatcggtacagatgcaatccacaccccagcgcagcaactctgctgcgcgctggggtttattgacggtataaaccagaatccgcagtccggcgtctttcaactgcatcactcgcgctttattgagtaacttatgattgagatgaatagagacgcagcccagccgcgcggtcagttcgcgccagtcgtcgcgccactcatccagcaacaaaccgcgcggcagttccggtgccgcctgttgtgcagcttctaaagcatcaatctcaaagctactcagcagcggcggcgtcataccggcccacagctcgcgtgccgccagcgccaccattttgcccgttaatggcccggtgccggtggtgggtttgatttcgatattcgccatcatcccgtgttcgcggcaacgttccgccacctggctaagcaacggtagcggctcacctttaaacattttgctgtaccaactgcccgcatccacgcgcagtaaatcctgccagttcagttcacccgcgacgccccagccgttgctggtacgttcgagattgtcgtcatggagcaggaagatctcgccatctttgcttaacttcgcgtcaaattcgatcatcttatgaccgtattttgccccgacgtcgatactcgccagggtgttttccggggccagcttaccgccgccacgatgagcgacgatgcggggataaggccagttactcatactcgttgtcctgtttcaccatcaaaaagatgcagctgattttccgccagatgcagccacagcgtgctgcctgccgtcgggcgctcctgatgcgccagtcgcaccaccagcttctgctcgccccagcgtccgtgcgccaggttatctgcgccgaggatctccagcgtgtccatcaccatcggtacgccgccttctgcctggctgcttagcgcaatatgttccgggcgaatgccgagagtcattttacgcccggcatactgacggtagccaccgtttagcggcagctcaataccgccgtccagttcgaaatgcgtgccttcgttattcacgcggcctgtcagcaggttcatcgccggactgccgataaaactcgctacaaacaggctggcgggcttttcgtagacttcaactggtgtgccaatctgttcggcaacaccgccgttcatcaccattactcgctgggcgagcgtcatcgcttcaacctgatcgtgagtaacgtagagactagtcgttttcaggcgacggtgcaactgttgcagttcaagacgcatctgcacgcgcagcttggcatcgaggttagagagcggctcatcaaacaggaacaccgccggatcgcgcacaatcgcgcggcccatcgccacacgctggcgctgaccgccggaaagctcgcgcgggcgacgtttgagcagaccgtccagctccagaatgcgcgccgcttctttaacgcgctcggcaatttgctgcttgcccatgccgcgaattttcagcccccacgccatgttttcttcgacactcatatgcggataaagcgcgtagttctggaacaccatcgcaatcccgcgatcttttggctccatttcagtcacgcgctggtcgttgatccagatatcgccttctgtcacccgctccagcccggcaaccatgcgcagcagcgtgcttttcccgcagccagacggcccgaccatcacgataaattcgccatccgccacatcaagggtcagcggtttaatgacctgggttttaccatcccagcttttggttactgcctgtaatttcagtcctgccatcttatttctcactatcgaccaggccgcgcacgaaggcacgctgcatcactaaaacaatcaccaccggagggataagcgttaacaacatcgccaccatcacactgttccattccgtggtgccttcgcctgtagcgatcatccctttgatccctgccacggtggtgccgagatccacatcggtaataatcaacaacggccacaaatactgattccagccgtagataaaggtgatcacaaacagcgccgccagattagttttggagagcggaaaaacgatgtcgcaaaagaagcgcattgggcttgcgccgtcgatccgcgcggcttccaccagctcatccggcagcgtcataaagaactggcggaacaggaaagtagcggtcgcgctggccatcagcggcagcgttaaaccggcgtagctgtcgagcatctgcaggttggcgatgacttccaccgtcgggaagatacgtacttcaaccggcagcatcagggtgataaaaatcatccagaagaagaggttacgtagcggaaaacgaaaccagacaatggcaaatgcgctgagcatgctgacggtaattttgccgagcgtaatgctgaacgccatcacaaagctgttaagcaacatccgccagaacggcgcgctattcgtgcctaccccgttcacccagatgttgtggatgttttccagcagatgtgtgccggggatgagcgtcatcggcgcggcatagacggcctgtttatccagcgtcgccgcgacaaacgccacgtacagcgggaagaggatcaccgcgatcccgaggatcagcatggtatggctgaatatcgtcagccacggacggttctcaatcattggtaacgcaccttgctttcaacatagcggaactgcaccaccgtcagcacgatgacgaggaacatcaacaccacgctctgtgcggcagagctagccagatccagtccggtaaaaccttcgcggtagatcttataaatcagcgtcgtggtggcctgaaccggcccgccggacgtggcggcgtcgatcaccgggaaggtgtcgaagaaggcatacaccaggttcactaccagcaggaagaaactcaccggggcgataagcggcagcgcaatcttaaagaagcggcgaatcggccctgcaccgtcgatggctgcggcttcgatcaagctacggggaatggattgcagcgcggcatagaagaacaggaagttgtagctgatttgcttccatacactggcaaacaccaccagaaacattgcctgaccgctgttttgcgcgtggttccagtcgtagccgaactccgcgagaaaatgggtgatcagcccgcgaccggggttaaacaggaagatccacaatacggcggcaacggcgggagccacggcgtaaggcagcaacattaaggtttgatagaaacggctgccgcgcacgatgtactccaccagcgccgcaaagaacaggcttaccagcaaaccgctgacggtgacaaaggtgctgaattttatcgtcgtccagaaggagtcgagatagtagctgtcatggaacagcgtgacgaagttatccaggccgacaaactggctggagaaaccaaacggatcgacgctttgtaggctgtaccacaacgcttcgcccgcaggccagataaaaaagataacggtgatgatgagctgcggcgcgaccagcagataaggcagccagcggctgcggaacaccggacgggaactactcattacggttaattcctgaactgtgccggatgcgcttcgcttatccggcctacacgcgatgccaggtcagataagcgaaacgcatccgacattacactgattaagacttcgtgcttttctcaaagcggcgcagcaactgatttccacgctcaacggcggtatccagtgcctgctgtggtgtcttcttaccggtccacacgctctccagctcttcatccacaatcacgcggatctgcggcatgttgcccagacgcagccctttggtgaacggcaacggcggcttattcagcatctgacgcgtcgcggtatccgcccctgggtttttctcataaaagccctgctcacgggtcaggtcatacgctgctttggtgattggcagataaccggttttctgatgccactcggcagcgttttctggcttcgcgaggaaatcgaggaacttcgccacaccggtatacgtttctttatctttaccctgcatcacccacaggctggctccgccgataatggcgttttgtggcgcatctttcgcatcggcgtcgtaaggcatcatgcctacgccgtagttaaatttggcgtactcgcgaatgttggcaagagaaccggaagaggcggtggtcatcgcgcaatcaccgttatagaacttctcggtggattcatccttacgaccgacgtagctgaagtcgcccttcttgttcatctcctcgagcatggcgatgtgtttcacctgctccggcttattgaactccagcaccgcgtccgtgccgtcaaagccgttgtttttgctggcaaacggcagaccgttccaggcgctaaagttttccagttggatccagccctgccagccgctggcgtagccgcacttcatgccggaggctttcagtttcgcggcatagtccgccagatcctgccaggttttcggcggctgttccgggtctaatcctgctttcttgaaggcgtctttgttgtaatagagaacgggggtgctgctgttgaatggctgggagagtaagtggcccgttttgctgtcggagtagtaaccactaaccgtcggcacaaactggctctcatcgaactgaatccctgcctctttaaacacgtcatacaccggtttaatggctttgctcgccatcatggtggcggtgccaacttcataaacctgcaaaatagccggcgcgttgccggtacgaaatgcggcaatccccgcgcttaaattctgttcgtagttgcctttataggtcggtacaattttgtaatccgggttttcggcgttaaaacgttgggccagagaatccacctctttacccagttccccttccatagaatgccagaacggaatggtcgtcactgcctgtgcattccccattaacgccagtccgagcgccagtgcactagctgtataatgtaacggtttcatcgtttatctctcttgttgtaccgaatgcgcgaattcacgcgttttatgctcgcggggtaacatgacatgctcgaattacagaaaaataacttttttgttacatttgtaagatagtaaggtgtcagaaagatgacaaggcggtgacggcgtgggtgagggaaaatgggagatggggcacggataagcgggaaaatatagaaggtctgaatcaaactctacagattgctcatcgtttcatgccggatgcggcgtaaacgccttatcaggcctacaagatcgtgcaaattcaacatattgccactcacccagtaggcctgataagcgcagcgcatcaggcaattttacatttgtcacctgtctcaaaggagtcttttgactccctatcaatcaacgtgttattacccgcctaaatacgcacttctcaccgcttcattcgccagcagcgcatcaccagtatcggaaagcactacatggccgttttccagcacgtagccgcgatccgccagctttagcgcctggttggcgttctgctcgacgagaaagatagtcatcccctgctcgcgcagctgctcgatggtgtcgaaaatttgctggatgataatcggcgcaagaccgaggcttggctcatcaagcagtagcaaacgcgggttgctcatcagcgcacgaccaatcgccagcatctgctgttcaccgccggacatggtgcccgcccgctgaatacggcgctcatgcagacgtggaaacagctcatacacccactttatgcgctcctggaactggtcgcgttcagcaaaaaaaccgcccatcgccaggttctcttccaccgtcatccggctgaagacgcgacgcccttccgggacaatcgccaccgcttcgcgcatgattttcgctgtctgccagtcggtaatgtctttatcatcaaacacaattcgcccgctggtggcacgcggatcgccgcataacgtgccgagcaaggtggttttccccgccccgttcgcgccaatcagcgtgacaatctcgccctgattgatatgcaggctcacctcatgcagcgcctggattttgccgtagtgggcgctgactttgtcaaaggacaacatgactttttccatcttatgcctcacctaaataggcacggatcacgtccgggttattacggatctgctccggcgtaccgtttgccagcggcgtcccctgattgaccacgtaaattcggtcgctaattcccatcaccagcttcatatcgtgttcaatcaacaagatagtggtgttgtgatgattgcgcagttcggcaatcagctcatccagctctttcgtctctttcgggttaagacctgccgcaggttcgtcgagcattaaaatctccggctgcgtcaccatgcagcgggcaatctcaagacggcgctggtcaccataggccaggttactcgcctgacggttggcgtgttccagcaaaccaatgcgctcaagccaggtcgcggcgcggtcgagcgcttcgctctgggcgcgacggaaggatggcgttttcaacaggccagagaacagcccggttttcagttgctgatgctgcgccaccagcaggttttcaattaccgtcatttcacggaacagacgcacatgctggaaggtgcgcaccacgcccatgcgggcaatttgctgccccggtaaaccttccaggtgctgatcgcgcagtaaaatggtgccgccggtgggtttgtagaatccggtcagacagttaaaaaccgtggtttttccggcaccgttagggccgattaagctgacgatctcctgcgggtacagttcaagattgacgttgttcaccgccagcaggccgccgaagcgcatcatcaggccgttaacagataataatggctgactcatgcctgctctcctttcgctgcgccgtttttcagcttcagttgcgggcgcgtcatgggcagcaagccctgcggacgccagatcatcatcagcaccatcaaaccaccgagcattaacatgctgtattcgttgaaatcacgcatcaactcgcggctcaccaccagcaaaattgccgccagaatcaccgcaaattggctgcccataccgccgagcaccactatcgccagcacaaacgcgctttcggcaaaggtgaaggattccgggctgacaaagccctgacgcgccgcaaacagcgttccggcaaaaccggcaaacgcggcacttatggtaaaggcagtcagcttgatacgacgcgggcttaagcccaggctacggcaggcgatttcatcttcacgcaacgcttcccacgcacgccccagcggcatccgcagcaggcggttaatgacaaacaggcttagcaccaccagcagcaacgccaccaggtagaggaagatgacacgatcggagggatcgtatttcaggccaaagaaattactgaacgtgtcccagccgccttcacgagcggtacggctgaactcgagtccgaagagtgtcggtttcgggatctgactgattccgttcgggccgccggtaatttcggtgttattgagcagcaatatgcgcacaatttcgccgaaaccgagggtaacgatcgccagatagtcaccgcgcaaacgcagcaccggaaaaccgagcaggaagcccgccgccgctgccattaatccagcaatcggcaggcaggtccagaagcccaagccgtaatagtgattgagcagcgcaaaagtgtaagcgccgatggcgtaaaaaccgccgtaccccagcaccagcagaccagaaagaccaacaaccacgttcagcccgagaccgaggataatgtagatcatggtcagggtggcaatatccaccgtcccgcgactaaccataaacggccacgccaccgcaagcaccaacagcgccacgaggaacagtttctgcttcaccgtggagccatcaatggcgggcagaataaacttcggtccggaaacgcttttcaaccctttctggaaagccggtcgcaaaagctggaagaaaaagaccaccgccgtgccgataaacacccactgccaacggacatcgctagccgtgtcgaccaccagtttggtgccatccagctccagttgcacgcccataaagacgcccgccagcacaaagaacatcgcggcagagagcagcgccattgcaatatgcatcggtttcatactttctctacctccgggcgacccagaataccggtcggcatcaccagcagcaccagaatcagcagggcgaaactgaccacatctttatattccgtactcagataggcagaagagagcgcctccgcaatccccagaatcaggccgccaatcatcgctcccggaatgctgccaatcccaccgagcaccgccgcggtaaaggctttcatcccggccataaagccgatgtaggggttaatgacgccgtagaactgaccgagcagcacacccgccaccgccgccatcgccgcgccaatcacaaaggtcagcgcaatcacccggtcggtgttaatgccaagcagactcgccattttcagatcttccgcgcaggcacgacacgcgcgacccatgcgggaatagcgaatgaaaatcgtcagcgccagcatggcgaggaaggtaacaatccagatcaccgcctgcatggtggtaatagaggcagagaagttttcgctatgccccaccacccactgaccgttaaacaggctcggcagcgccacgtcgcggctaccttcggtcaggctgacgtagttttgcaggaagatggacataccgattgcagagatgagtgcaatcaggcgcttagagttacgcaccgggcggtaagccacccgttcgatactccagccgtaggcgctggcaatgacgattgcgccgacgaatcccgcagctaccagcagccagccggtatcaatgcccatcatcatcagcgcggcgatgatcataaaactgacgtagctgccaatcatataaacctcgccgtgggcgaagttgatcatgccgataatgccgtaaaccatggtgtagccgatggctatcagcgcgtaggtactgcccagcgtgacgccgttaaacatctgctgcaagaaatacaaaaactgctcagacataaggtaacctttctaaacccgcccgcattttacgggcggtgggatgatcacttggctgccgtggaactaccgtcggcgtgccactggaagacaccaaaatcaaatcccttaagatcgcctttttcatcccagttcagcggcccaatcacggtgtttgcaccgttagcttttaaatctttcaccagcgccagcggctcatcgctgccggtacgctcaagggcagtcgccagagattgcaccgccgcgtaggtgatccagacataaggcccggacggatctttcttgtctgctttcagcgcatcaacgatgccctggtttgccggatcctggtcatagcgttttggcatagtgaccaacatgccttcggcggcatcaccggcaatgttgctcaagctcgcattacccacaccttccggccccataaactgggttttcaggccaacggaacgggcctggcgcagcatctgccccatttccgggtagtaaccgccgtagtaaacgaagtcgatgttttcttttttcaggcgggcgatcagcgcggagaaatctttctccccggcggtaataccgtcgaagaagacgacgttggcgttagccgctttcagcccgtcctgcacgctacgcgccagcccttcgccatactgttgtttgtcgtgaatgatggcgatgcgctggggcttcaccgtctcaagaatgtattttgccgccgttggcccctgggaagagtccagcccggcagtacgcataatgtgttgataaccgcgttgggtcagctccgggttggtcgctcccgggctgatcatcagaataccttcgtcttcatagatatcactcgcaggctgggtagaagaagaacacagatgaccaataacgtatttaatgccgtcattaacgattttgttggcgaccgcaacggcttgtttcgggtcgcatgcgtcgtcatattccacgccaaccagtttatcgcccttaattccccctttggcattaatgtctttaattgcctgacgcgcgccgttaaattccatatcgccccactgggcaatcgggccggacatcgcgccgacaacggcgactttaatatcgtcagccatagcggtgtgactaattgccagtgcaatcatccctgcgatgatagttttcgcattccgtttcatagtcaaaaatccccattcgtgatgttgtgttgctttgtttttatgtgttaacaaatcagactgttctttttttatactgcactgtttttgcctgtctgattaaggggttagcgcagtattttgtgataatagcgattaaaatccctatttttcagtcgattaagaacagataatattctgaatttattgatagataaacagaaaaaagtgcctttgtcagcataaaataacggcacaaagggcggaataattcactatcattcaggggattatgctggacatttttcattctctaatgttttaattttgtaattattgctgttaaaaaattaatcacctgccaaaagaaataaaaaagagaaagcctccgattaaattatttcgctacactggttccacttttgtgatttacacgggttacccatgaagctgaccatcattcgattagaaaaatttagcgaccaagaccggattgacctgcaaaagatctggccggagtattccccttccagcttacaggttgacgataaccaccgtatctacgccgcgcgttttaacgagcgcctgctcgctgccgtgcgggtaaccttaagcggcaccgagggagcactggattccctgcgcgtgcgggaagtcacccgccgtcgcggtgtggggcaatatctgctggaagaggttttgcgtaacaatcctggcgttagttgctggtggatggcggatgcaggcgtggaagatcgcggtgtgatgacggcgtttatgcaggcgctggggtttacggcacaacagggcggctgggagaagtgttaatcgtcaagtttgatttcaaaagtgatattgcctgatgcgctacgcttatcaggcctacaatgtgtgttgcaatttactgatttctttggatcttgtaggccggataaggcgtttacgccgcatccggcatgaagcaacgtactcgatattagcaatttggcggcaacccaaagttgccgattaatgattacttcgcatcggtcgccgtgccgttggcgtgccagtcaaatacgccgaactcaaagcctttcagatcgcctttctcatcccaggtcagcggtcccattacggtatccacggagttcgctttcaggtatttggcgatttcagccggatcgtcagactgattcaggcccgcctgcaaagattgcagcgcggcgtaggtggtccaaacgaatgcgccacttgggtcctgttttttcgctttgatcgcgtcaacaatgggtttgttcgccggaacctgatcgtagttcttcggcttggtcaccagcagcccttccgcactttcgcccgcaatgttagacaggctaacgttagccacaccttccggccccataaactgagttttcagccctgccgcgcgtgcctgacgcaggatttgccccatttccgggtgataaccgccgtagtaaacgaagtcgatattctcttttttcagacgcgccaccagcgtactgaaatctttttccccggcggtgatgccatcaaagaacaccacgtttgcattgcctttcttcaggccgtcctgcaccgctcgcgccagaccttcgccgtattgctgtttgtcgtgaacgatagcaatacgctgcggtttcactttctcaagaatatatttcgccgccgtcggcccctggtcggagtccaggccggtggtgcgcaggatcagctgatagccacgggcggtcagctccggcgcggttgccgctggggtgatcattaaaatgccttcgtcttcgtagatgtcagacgcaggctgcgtactactagaacagaggtgaccaatcacatatttaatgccgtcgttaacgactttgttcgccaccgcaaccgcctgtttcgggtcacaggcatcgtcatattttacgatttgcagtttgttgcctttaatgccgcctttagcgttgatatccgcaaccgcctgctctgcgccggtaaactcctggtcaccgtactgcgcaaccggaccggacattgcgcccacgaccgcgactttaatatcttctgccagagccatattgctgaatgccagcgcgatacatcctgccagtaacgctttaccctttatgttcatcctgagaatccccattcttctggttattacgtgtgttgtgatgttgtttttcagcactttatttcgttttatgcatgactacccgtgctttagcagcatactctgctaaaacatacccgatttttatgatattggaatagctattttgacagtttattaacaatctgcgtggggattggcgttttgccggaggggaaattgattattacagaggcccaaaaaacaaaaaccccggactctcatccagggttctctgcttaatagcggaaattacgcttcaatggcagcacgcaattttttcatcgcgttcttttccagctggcgtacacgctcagcggaaacgccgtaacggtcagccagttcctgcaacgtggacttgttgtcttcgtccagccagcgcgcacggatgatgtcctggctgcgttcgtccagaccctgcatcgcgtcggtcagacggtttgccgcctgctcttcccagttatcatcttcaatgccgtcggcaaagttagaacttttatcctgcagatagagcaccggagccatcggctggctgtcggaatcgtcgtcggaagacaggtcaaaggtcatgtcctgtgccgccatacgactttccatctcacgtacgtctttgctggttacgcccagttcacgggccaccatttcgacttcatcctggttaaaccagcccagacgctgcttggttttacgcaggttgaagaacagtttgcgctgcgctttggtggtcgcaactttgacgatacgccagttacgcagaacgtattcgtggatctctgctttgatccagtgaacggcgaaggagaccaggcgcacacccacttccgggttgaaacggcgcactgctttcatcaggccgatgttaccttcctgaatcaaatccgcctgtggcaggccatagcccgcataattacgagcaatatgaacaacaaaccgcaggtgagacaggatcagcgttttagctgcttccagatcgccatggtaatgcagcttttcagccagcgcccgctcctcgtcagcgctcaacatcggccacgcgttagctgcccggatgtaggaatccaggttgccaactggggctaaagctaaactttgcattttgtcagtcattcaaatcctctcaatcgatatcttctggcgcttcagtggtagcaacaactgtgccagagcttaagagcaacgaggttatcattcactgttttatcagaccgtgattttatccacaagttcaatgcaagcttgtgaataaattacgcacaaaatgtgacatagagatgaaataccgggaagagacaacggggtctctttccctgctacggaacccattgcagggaaagagtataacacgcttttattattcaggcgtaaagtggcgtaaatgttgtaccgtggcaagccacgctgccacccagccaatcatgctgcataccagcagcaatagcaggcattcatcgaaacttaagccattgatatcaaacttcgttccgaaaacctgtgccacttccgcaaccgcgctactcaatcgcagcaccagaatttcactcaaaattaaactcaacaatgcgccagaaaatcccagcagtgcgccaccatacaggaacgggcgcaggatgaatccatctgtcgcaccaatcagtttctgtacgttaatggagtcacggcgagcaaagatactcagacgcacactgttaccgatgacgaggaacacggccgccaccatcaacacgccgatcatcgcgctaacgcgcccgaccagcccggtcaacgccgccagacgggcaaaccagctgtcatccatccgcacttcgtcaatgccgttaatctgcgtgatacgatcacgcagcgtattcagactttccgtcccctggaaatcgagtttcgggatcaccaccgccactgccggaagcgggttttcttccagcatatccagcgcaccaccaaaaccagaccagttacggaactcacccagtgcgtcttcacgagaaagatagttcactttctccacgccttgctcggcctgcaactgtgccaccacgcccgcagcagcgtcatcgtccagcgttttttgcagataaacagtgatttgcggactcggataatactgcgtcgccgcctggttaacgtttttgtacaccatataacagacgctgggcagcgtcagagaaatggcgataaccatcaccgttaaaaacgtggcgaacggtttgcttttcagatcctgcaatgcgccgtggaaggcatagcgcacctgttcgttgaaaacgttggttttgcgatttaccggttttgggctggatttcgcgcgttttggtgcgttacgaccgccgtcgccactgccgccgacgcttttacggaagcgatcaagacgcccgccaaactgccgaatatgattgattgcatcgcgcttattcatggcccacgcctccatgcaagtgaccatcgctcagggtgagcatgcgataggaacgccggctgatcaggttgatgtcgtgcgttgccatcaatacggttaccccaacgcggttaaactcttcaaacagacgtaaaatgccttcgctcagcgcgtcgtccaggttaccagtcggttcgtccgccagcagtaccgcgggcttgttcaccaccgcgcgggcaatgccaacacgctgttgttcaccgccgctaagctgaatagggaagttcttcgctttgtccagtagcccgactttatccagcgccgcgctcacccggcgacgaatatcgtcaccgctggcaccggcgataatcagcgggatcgccacgttatcgtagacagtacggtccatcagtagatggtgatcctggaaaatcatgccaatctggcggcgcagaaacggaacttcacggtttttcagacgcgtgatgtcatggccgctaaaccagattttcccggcgctgggccgctcaatcccacagatcagcttcaggagggtacttttccctgcgccggaatgaccggtcagaaacgccatctcacccggctgcatatggaacgtaacgccctgcagcgcctgtctcccaccgagataagccttgctgacatgttcaaagcgaatcattgttaatcctctcgggcaaaaagtgcctctataaagtcgtccgccttaaacggacgcaaatcctcaatacgttcgccgacaccaatgtagcggatagggataccaaactggtcagccacgctgaaaattaccccgcctttcgccgtgccgtccagtttcgttagcgtgatgccggttaagccaacggcttcatggaacagtttggcctggcttaccgcgttctgcccggtgctggcatcaatagtcagcataacttcatgcggcgcttcaacgtcgagtttcttcatcacgcggacgattttcttcaactcttccatcaggtggcttttgttctgcaggcgtccggctgtatcggcaatcaggacgtcgatattacgcgctttagctgcctgaatggcgtcgaagataacagaggcggaatccgccccggtatgctgggcaatcaccggaatattgttgcgctgaccccagacctgaagctgttcaaccgcagctgcacggaaagtatcacccgccgccagcatcacgcttttaccctgctgctcaaactgacgcgccagcttaccaatcgtcgtggttttacccacaccgttgacgcccaccatcaggatcacaaacggcgctttgccttcaacattcagcggctcatcgactttcgccagaatctcgcccatctcttctttcagcaggccatagagcgcctcggcgtcacgaagctgcttgcgggatgcgccttccgtcagattggtgataattttacgtgtggtttccacacccacatcggcgatcaaaagctgctcttccagctcctcaaacagatcatcgtcgatttttttaccgcggaacaggctgataaatccggaaccgagattttctttggtttttaacaggctgcgtttcaggcgcgcgaaaaaaccttctttggtcggtttttcctgctcctgagcgatttcttccaccggctgctcttcttctgccggaggaaccaccatcaccgcctcttctgccgcttcggcagccagcgccgtttccagctcttcgtcggtaatttcttctttagccgcttcttcttccgccgcttcgacaatctctacggtttccgcttcagcctgccactcttctgggctaaccgcttcggcgttgacgtcttccggcaacggcagctcttcacgttcgatagccactggctccggcgtttcttctacgaccggttccggctgtgcaacgacttccgcttcaggctgcgctttttcactttcagcaacctgttcagtgacttccacaacgtcggcagcaaaagtttccgcctcggcttcagtatgcgcttgcggctgctcttcaacggcttgttcagaggccttcacaggctcttgcgcctgaacgatttcttctacaaccggttgttcattctgaacttctgtctctttttccggggtctgctctttttgaccaaagcccagccaggaaaaaaagccacgttttttttctttcgccatttgcgactacactcctcgctgttgcttcatggcacagcgttaacgctatgtacatagcagctaaaaaaatgatgaaatagtctatcacttaacttaattcacatcaccgcctgcaagtatgtgttatctggcggattgagcaatttatcatgaaaaaaccgaatcattccggcagcggccaaatccgcattattggcgggcagtggcgaggccgtaaactcccggttcctgatagcccaggtctgcgccccaccaccgaccgcgtacgcgaaacgttgtttaactggctggctccggtcattgttgacgcccaatgtctggattgcttcgccgggagcggcgcgctggggctggaagcgttaagccgctacgctgcgggggcaacgttgattgagatggatcgcgcggtttctcagcagttaattaagaatctggcgacactaaaagcaggcaatgcacgcgtggtgaacagcaacgcgatgagtttcctggcgcaaaaaggtacaccgcataatatcgtgtttgtcgatccaccgttccgccgtggcttgttagaagagacgataaatttactggaagataacggctggctggctgacgaagccctgatttatgtcgaaagcgaagtcgaaaacggtctgcccactgttccagcaaactggagtttacatcgggaaaaagtggcgggtcaggtggcttatcggctgtatcaacgcgaagcacaaggagaaagtgatgctgattaatattggtcgtttgttaatgctctgcgtttggggatttttaatcctcaacctggtgcatcccttcccacgcccgctgaatatcttcgttaacgtggcgctgatttttaccgtgctgatgcatggtatgcagctggcgctattgaaatccactttaccgaaagatggcccgcagatgaccaccgccgaaaaggtacggattttccttttcggcgtgtttgaactgctggcctggcagaagaaatttaaagttaaaaaataaccttattgttcgcctacaaagctgacaaagcgcgttcctttatagctcagcgtacctttatcgcccactgtcagggcgtggtactgctgggcgtcgaggcgaaacgtctgctccattcctccgctttgcggtttgaagcttgcctcatagcgtatactggtgcctgccggagtcacttcctgctggcggctacggcgatcgttaatcggtttttcccgcttgttgctcaccaccaccagcttttgctggagcggagccatatcattatcagctttttcccgtcgctgttgcataaaacgaaagcttgcggcgacgacaattaagccaatgataacaataaagaaaagaggtggtttgctcatctttatccctcatcggaaaatgcggaaataagcataccctgccagttatggtgttgtcatccgtccaccctcgccactaaactggaagcaagaccgtaggcattccgcttacgaaaaaataacgaattcaaggaactaagatgctttggagctttatcgctgtctgtctttccgcatggctatctgtggatgcaagctatcgtgggccaacctggcaacgctgggtgtttaaaccgttaacccttcttctcctgctgttactggcctggcaagcgccgatgttcgacgccattagctatctggtgctggcagggctgtgcgccagtctgctgggcgatgcgctaaccctgttgccacgtcaacgtctgatgtacgccatcggcgcgtttttcctcagccacctgctgtacaccatctatttcgccagtcagatgacgctctctttcttctggcctctaccactggtgctgctggttctgggtgcgctgttactggcgattatctggacgcgcctggaagagtaccgttggcctatctgcacgtttatcggcatgacgctggtgatggtgtggctggcaggtgaactgtggttcttccgtccgaccgctccggcgctctctgcgtttgttggcgctagcttgctgtttatcagtaactttgtctggctggggagccactatcgccgacgcttccgtgcggataacgcgattgctgcggcctgctactttgccggtcacttcctgatcgtccgcagcctgtatctctgataaaacttgactctggagtcgactccagagtgtatccttcggttaatgagaaaaaacttaaccggaggatgccatgagcactcctgacaatcacggcaagaaagcccctcaatttgctgcgttcaaaccgctaaccacggtacagaacgccaacgactgttgctgcgacggcgcatgttccagcacgccaactctctctgaaaacgtctccggcacccgctatagctggaaagtcagcggcatggactgcgccgcctgtgcgcgcaaggtagaaaatgccgtgcgccagcttgcaggcgtgaatcaggtgcaggtgttgttcgccaccgaaaaactggtggtcgatgccgacaatgacattcgtgcacaagttgaatctgcgctgcaaaaagcaggctattccctgcgcgatgaacaggccgccgaagaaccgcaagcaagtcgcctgaaagagaatctgccgctgattacgctaatcgtgatgatggcaatcagctggggtctggagcagttcaatcatccgttcgggcaactggcgtttatcgcgaccacgctggttgggctgtacccgattgctcgtcaggcattacggttgatcaaatccggcagctacttcgccattgaaaccttaatgagcgtagccgctattggtgcactgtttattggcgcaacggctgaagctgcgatggtgttgctgctgtttttgattggtgaacgactggaaggctgggccgccagccgcgcgcgtcagggcgttagcgcgttaatggcgctgaaaccagaaaccgccacgcgcctgcgtaagggtgagcgggaagaggtggcgattaacagcctgcgccctggcgatgtgattgaagtcgccgcaggtgggcgtttgcctgccgacggtaaactgctcagtccgtttgccagttttgatgaaagcgccctgaccggcgaatccattccggtggagcgcgcaacgggcgataaagtccctgctggtgccaccagcgtagaccgtctggtgacgttggaagtgctgagtgaaccgggagccagcgccattgaccggattctgaaactgatcgaagaagccgaagagcgtcgcgctcccattgagcggtttatcgaccgtttcagccgtatctatacgcccgcgattatggccgtcgctctgctggtgacgctggtgccaccgctgctgtttgccgccagctggcaggagtggatttataaagggctgacgctgctgctgattggctgcccgtgtgcgttagttatcagtacgcctgcggcgattacctccgggctggcggcggcagcgcgtcgtggggcgttgattaaaggcggagcggcgctggaacagctgggtcgtgttactcaggtggcgtttgataaaaccggtacgctgaccgtcggtaaaccgcgcgttaccgcgattcatccggcaacgggtattagtgaatctgaactgctgacactggcggcggcggtcgagcaaggcgcgacgcatccactggcgcaagccatcgtacgcgaagcacaggttgctgaactcgccattcccaccgccgaaagtcagcgggcgctggtcgggtctggcattgaagcgcaggttaacggtgagcgcgtattgatttgcgctgccgggaaacatcccgctgatgcatttactggtttaattaacgaactggaaagcgccgggcaaacggtagtgctggtagtacgtaacgatgacgtgcttggtgtcattgcgttacaggataccctgcgcgccgatgctgcaactgccatcagtgaactgaacgcgctgggcgtcaaaggggtgatcctcaccggcgataatccacgcgcagcggcggcaattgccggggagctggggctggagtttaaagcgggcctgttgccggaagataaagtcaaagcggtgaccgagctgaatcaacatgcgccgctggcgatggtcggtgacggtattaacgacgcgccagcgatgaaagctgccgccatcgggattgcaatgggtagcggcacagacgtggcgctggaaaccgccgacgcagcattaacccataaccacctgcgcggcctggtgcaaatgattgaactggcacgcgccactcacgccaatatccgccagaacatcactattgcgctggggctgaaagggatcttcctcgtcaccacgctgttagggatgaccgggttgtggctggcagtgctggcagatacgggggcgacggtgctggtgacagcgaatgcgttaagattgttgcgcaggagataaggcaaaccgatcgcaacattgagcgcgatcggtcccctcgcccctctggggagagggttagggtgaggggaaaaggcggcatcgaagccaatcagcccctatcaaccgcctttacgaatcaaataacgataaggcagtccatccgtctctttagcaaccagttcgtgttccataaaggtacaaaacccaggaatatcgcgggtagtggccggatcgtcggcgataatcagcaacgtttcgccaggctgcatattgcgcacggttttgcgcaccatcatcaccggttccgggcagcgcaggccaagcgcgtcgagtgtgtggtcagggctggaaaagagatcggtcattttcttctcatcacttaaaaaaacggcgctagtttacgccctgtgagtccgtaagcaaactaggttaacgattgcgtgaaaattaaccattgcattgtcaacgtaaagcagtatcatgcggcggctcgaaaaaagggtaagcacgttattatgttaaggtaacagacgtgtcgtacgtattgggttccctcaccccaatggttaatcaaaaaggtacaatatgaacgttttcagccaaactcaacgctataaggcgttgttctggttaagcttatttcatctgctggtgatcacctccagtaactatctggttcagcttcccgtctccattttgggtttccataccacctggggcgcgtttagctttccgtttatttttcttgctaccgacctgaccgtgcgtatttttggcgcaccgctggcccgacgcattatcttcgcggtaatgatccctgcgttattaatctcctacgtcatcagcagcctattctatatgggttcctggcagggattcggcgcactcgcccacttcaacctgtttgtcgcccgtatcgccaccgccagtttcatggcctacgcgctggggcaaatcctcgacgtgcacgtttttaaccgcctgcgtcagagtcgccgctggtggctggcaccgacagcgtccacactgttcggtaacgtcagcgacacgctggcctttttcttcattgccttctggcgtagcccggatgcctttatggctgaacactggatggaaatcgcgctggtcgattactgtttcaaagtgttaatcagtatcgttttcttcctgccaatgtatggcgtattactcaatatgctgttgaaaagactggcagataaatccgaaatcaacgctttgcaggcgagttaaaggttcgttatcagagttgtgataagatggatgaatgagccgttatggccgtttatcgaaaggaagaagtcaatgcgcaatctggttaaatatgtcggaattggcctgctggttatggggcttgcggcctgtgatgataaagacactaacgctacggcgcagggtagcgtcgcggaaagtaacgctaccgggaatcccgtcaacctgcttgatggcaagttaagtttcagcctgccagcggatatgaccgaccagagcggtaagctgggaacgcaggccaataacatgcatgtctggtccgacgccaccgggcagaaagcagtcatcgtcatcatgggcgatgatccgaaagaagatctggcggtgctggcgaagcgtctggaagatcagcaacgtagccgcgatccgcagctgcaagtggtaaccaataaagccattgagctgaaaggtcacaaaatgcagcagttagacagtattatctccgcgaaaggccagacggcgtactcttccgttattctgggtaacgtgggtaatcaactgctgaccatgcaaattacgctgcccgctgacgatcagcaaaaagcgcagaccaccgcagaaaacatcattaatacgctggttattcagtaagttttaagaactactggcggcctcagggacgtgttccggaggccgtttttttaatcgccacgtcagtaataacgcgattgcgaccagtcccgccgccgccagataaatcaccggtacgcccgcccagctcatcaccagcccagccagtggtccagtcacgccaaggcttaaatccataaatacggtgtaagttgccagcgccgccccctgattttgctgcggaaccgcttttaccgccactacacccaatgccgggaacaccaggctaaacccggcccccgccagtaagacgccgattttcgccatccacggcatagtcgccacgccaaccagtagcaggccgattatctcaacgctaaagcaaatcatcgctacgtttaagccaccgatacggttaatgccgttagggaataacaaacgcgtaccgacaaacgcacagctaaacagcgtcagcgcgaaagccgcaccgtcccaacctttagcgtcataaaacagcgtgataaaggtggcgatgacgccaaatccggcggaagccagtgccagcgccataccgtacagccagacgcgcccaagcaccgcgcgaaacggcagcggtttgcctttactggcttttaccgtcggacgcgggatcgccaacaaaatggccaccagcgccacgcccataatgattaacgctaacgcctgcaagccgccccagtgataaaacacgacgcctaacggcgcacccatcgccatcgccccgtaagtgacaatgccgttccagctaatcacccgcccgatatgcaggctgccaaccacgccaacgccccatagggtgcttcccgttccggcaaaactttgcccaatcccaaggatgacgcgccccaggcaaagtaataacaggctgatgacaggcagactggcggttaatcctgccgtcagataccccagaccgctcaaaaagcagccgcataaaccgaagacgacaatctttttgggtcccaggctatcggcgtaacgtccggcatgagggcggctcagcaaggtggcgaaatattgcaggctgataaccaatcctgcccagaaggcgctaaagcccatcacatcatggacatagcccggtaatacagcgagcggcaacccgatggtgaggtagctggcgaagttaaacatgactatagagacaatgcgcaaattcaggcgcaatccgtttagcgcgggttcggctacgggttcgggcatgaggatcaccacatttttacaacagtgtttcatttttaccacgtgctgacgtgaaaatcagcagtaagaatcagaatattgctggcgtgactcccgctacacttaatacaaaaagtcacaaggaagccccaatggaaacccctcaacccgataaaacgggcatgcacattctgctcaagctggccagcctggtagtgatcctcgcgggcattcacgcagcggcagatatcattgtgcagctgttactggcgctgttttttgccatcgtcctcaacccgctcgtcacctggtttattcgtcggggagtacaacgccccgttgccattacgattgtagtggtggtgatgctgatcgcactaaccgcgctggtcggcgtactggcggcaagctttaacgaatttatctctatgctgccgaagtttaataaggagctgacgcgcaaactttttaaattgcaggagatgttgccttttcttaatttgcatatgagcccggagcgaatgctgcagcggatggacagcgaaaaagtggttaccttcaccacagcgctaatgaccgggctttccggggcaatggcgagcgtgcttttgctggtgatgaccgtagtttttatgctgtttgaagtgcgccacgtcccttacaaaatgcgttttgcgctgaataatccacagattcacatcgcgggattacaccgcgcacttaaaggcgttagccactatcttgcattgaagacgctactcagtttatggacaggtgtcatcgtctggctggggctggagctgatgggggtgcagtttgcgctgatgtgggcagtactggcgtttttgctcaactacgtgcccaatatcggcgcggtaatttccgccgtaccgccaatgattcaggtgctgctgtttaatggtgtttacgaatgtattctggtcggcgcattgtttttagtggtccatatggtcatcggcaatattttagaaccacggatgatgggccatcgcctggggatgtccaccatggtggtatttcttagtttgttaatttggggatggctgctcggcccggtagggatgctacttagcgtgccattaaccagcgtgtgtaaaatctggatggaaaccaccaaaggcggtagcaaactggcgattttactggggccgggcagaccgaaaagtcggttaccgggatgaggcgacaagtgatacgatacgcactttcattttccattaaacgttggccctgatatgtatcggatagttctggggaaagttagcaccttaagcgcagctccactgccaccgggtttacgcgagcaagcaccgcaaggtccacgacgcgaacgctggctggcggggcgtgcattgcttagccacacgctttccccgctaccggagatcatctatggcgaacaaggcaaacctgcatttgcgccggaaatgccgctatggttcaacttaagccatagcggtgacgatatcgccctgctgttgagtgatgaaggcgaagtcggctgcgatatcgaagtgattcgcccgcgcgccaactggcgctggctggcgaacgccgtattcagcctcggggaacacgctgagatggacgccgtgcatcctgatcagcaactggaaatgttctggcgcatctggacgcgcaaagaagccatcgttaaacagcgtggcggcagcgcctggcaaatcgtcagcgtagacagcacctatcactccagcctgagtgtcagccattgtcagcttgaaaatttaagccttgcgatctgcacccctactccctttacgctcaccgccgacagtgtgcaatggatcgatagtgttaactgatccgcccacccgactgcccatctattgatccagaacaggtaatcagtatgacgaatacttaaaatcgtcatacttatttccgccatctattttaatccattggggttaccatgctctccacactccgccgcactctatttgcgctgctggcttgtgcgtcttttatcgtccatgccgctgcaccagatgaaatcaccaccgcctggccggtgaatgtcgggccactaaacccgcacctttacacgcctaaccagatgttcgcccagagcatggtttatgaaccattggtgaaatatcaggcagacggtagcgtgatcccgtggctggcaaaaagctggactcatagtgaagatggtaaaacctggaccttcaccctgcgtgatgacgtgaaattctccaacggtgaaccgttcgatgccgaggcggcggcagaaaacttccgcgcagtgctcgataaccgtcaacgtcacgcctggctggagctggcaaaccagattgttgatgttaaagcactcagtaaaacagagctgcaaattaccctgaaaagcgcctactatcctttcctgcaagaactggccctgccccgtcctttccgttttatcgctcccagccagtttaaaaaccatgaaaccatgaacggaattaaagcgccgattggcaccggaccgtggattttgcaggaaagcaaactgaatcagtacgatgtcttcgtccgtaacgaaaactactggggcgaaaagccagcgattaaaaagatcacctttaacgtcatcccggacccgactacccgcgcggtggcgtttgaaactggcgatatcgacctgctgtacggaaacgaagggttattaccgctcgataccttcgcccgctttagccagaatccggcttaccacacccaactgagtcagccgatcgaaaccgtgatgctggcgctcaataccgccaaagcccccaccaacgagctggcagtacgtgaagctcttaattacgcggtaaacaaaaaaagcctgattgataacgcgttgtatggcacccagcaggtcgccgacaccctgtttgccccttctgtgccctacgccaacctcggcctgaaaccgagccagtacgatccgcaaaaagcgaaagcgttgctggaaaaagccggttggacgctgcctgcgggcaaagacatccgcgagaaaaatggtcagccgctgcgcattgaacttagcttcatcggcaccgatgcgttaagcaaaagcatggcggaaatcattcaggctgatatgcgccagattggcgcagatgtcagcctgattggcgaagaagagagcagtatctatgctcgtcagcgcgacggtcgttttggcatgattttccaccgcacctggggcgcgccatatgatccacacgccttcctcagtagtatgcgcgtaccgagtcacgctgacttccaggcacagcaaggattagccgacaaaccgctgattgataaagagatcggcgaagtgctggcgacccatgacgaaacgcaacgtcaggcgctgtatcgcgacattctgacccgtctgcatgacgaggcggtttatctgcctatcagttacatcagtatgatggtggtaagtaaaccggagctgggtaacatcccctacgcgccgatcgccaccgaaattccgttcgaacagattaaaccggtgaaaccttaatgttgcgttacgtattacgccgctttctgctgctgatcccgatggtgctcgccgccagcgtgatcatttttctgatgctgcgcctcggtaccggcgacccggcgctcgattatttgcgtctgtctaacctgccgccgacgccggagatgctggcctctacccgcaccatgctgggactggatcagccgctgtacgtccagtacggcacctggttgtggaaggcgctgcatcttgactttggtatcagtttcgccagccaacgcccggtactggacgatatgctgaacttcctgcccgccacgctggaacttgcaggtgcggcgctggtattaattctgctcacttccgtaccgctcggtatctgggcggcgcgccatcgcgaccgtctgccggatttcgccgtacgtttcatcgcgtttcttggcgtgagcatgcctaacttctggctggcgtttttactggtgatggcgtttagcgtgtatctgcaatggctacccgcgatgggttacggcggctggcagcacatcattttgcctgcggtttccattgcctttatgagcctggcgattaacgcgcgtttactgcgcgccagtatgctggacgtcgccggtcagcgtcacgtcacctgggcgcgtctgcgcggcctgaacgacaaacagaccgaacgtcgccacatcctgcgcaatgccagcctgccgatgatcaccgccgtggggatgcatatcggcgaactgattggcgggacgatgattatcgaaaacatctttgcctggccgggcgtcgggcgctatgcggtgagcgcgatttttaaccgtgactatccggtgatccagtgctttacgctgatgatggtggtggtttttgtggtctgtaatttgattgtcgatttgctcaacgccgcgctggacccgcgcattcgtcgtcatgaaggagcgcacgcgtgaactttttcctctcttcccgctggagcgtacgcctggcgctgatcattatcgccctgctggcgctgattgcgctcaccagccagtggtggctgccgtatgacccacaggcgattgatttgccgagccgcctgcttagcccggatgcgcagcactggctgggcaccgatcacttaggtcgcgatattttcagccggctgatggcagcgacccgcgtgagcctcggtagcgtaatggcctgcctgctgctggtgctgacattagggctggttattggcggcagcgccgggttgattggcgggcgcgttgatcaggccaccatgcgcgtcgccgatatgtttatgaccttcccgaccagcattctgagcttctttatggttggcgtgctcggcaccgggctgaccaacgtaattatcgccatcgccctgagccactgggcgtggtatgcacgcatggtgcgcagcctggtgattagtctacgccaacgcgagtttgtgctggcgagtcggctttccggtgcgggccatgtgcgggtgtttgtcgatcatctggcaggcgcggtgatccctagcctgctggtgctggcaacgctggatatcggccatatgatgctgcacgtcgcggggatgtctttccttggcctcggtgtgaccgcgccgaccgccgaatggggcgtgatgattaacgacgcgcgccagtatatctggacccagccgctgcaaatgttctggccggggctggcgctgtttatcagcgtgatggcctttaacctggtgggtgacgcactgcgcgatcatctggaccctcatctggtgacggagcacgcacactaatgccgcaacagattgaactacgtaatatcgcgctacaggccgcgcagccgctggtacacggtgtaagcttaaccctgcaacgcgggcgcgtgctggcgttagtcggcggtagcggcagcgggaaaagtttaacctgcgccgcaacgctgggcattttgcccgctggcgttcgccagacggcgggggaaattttagccgatggcaaaccggttagcccttgcgccctgcgcggcatcaaaattgccaccatcatgcagaacccgcgcagcgcctttaatccactgcacaccatgcacacccacgcgcgggaaacctgcctggcgttagggaaacccgccgatgacgctacgcttaccgctgccatagaagcggtggggctggaaaacgccgcgcgcgtgctgaagctgtacccgttcgagatgagcggcggcatgttgcagcgcatgatgattgcgatggcggtgctgtgtgaaagtccgtttatcatcgccgatgaaccgaccaccgaccttgacgtggtagcacaggcgcgcatcctcgatctgctggaaagcattatgcaaaaacaagcgccgggaatgctgctggtgacccatgatatgggcgttgtggcgcgtctggcggatgacgtggcggtgatgtctgacggtaagattgtcgaacagggcgatgtagaaacgctgtttaacgcccccaaacatacagtgacgcgcagcctggtttccgctcatctcgccctctacggtatggagctggcaagttgacctaatacggtatggagctggcatcatgactttacttaacatctccggcctttcccatcactatgcgcacggtggatttaacggaaaacatcaacatcaggcggtgctgaataacgtttccctgaccctgaaaagcggcgaaaccgtcgccctgctggggcgcagcggctgcgggaaaagtaccctcgcgcggttgctggtgggtttagaaagccccgcgcaggggaatattagctggcgtggcgaaccgctggcgaaactcaatcgcgcccagcgtaaagcgttccgccgcgatattcagatggtatttcaggactccatcagcgccgtgaatccgcgcaaaaccgtgcgcgagatcctgcgtgaaccgatgcgccacctgctaagtctgaaaaaatccgaacaactggcgcgcgccagcgaaatgctgaaggcggtcgatctcgatgacagcgttctcgacaaacgcccaccgcagttaagcggcggccagctccagcgcgtctgcctggctcgcgcgctggcggtcgaaccgaaactactgattctggatgaagccgtttctaaccttgatctcgtgttacaggcgggtgtcattcgcctgctgaaaaagctacaacaacagtttggcaccgcctgcctgttcatcacccacgacttacgcctggtagaacgcttttgccagcgggtaatggttatggacaacggacaaatcgtcgaaacccaggtggtgggagagaaattaaccttttcctctgacgccggacgtgtgctacaaaacgcggtattacccgcattccccgtgcgccgtcgcaccacagaaaaggtttaacgcaaatgcaacgagtcaccatcacgcttgatgacgatttactggagacgctggacagcctgagccagcgtcgtggttataacaaccgttccgaagctatccgcgacattctgcgtagcgccctggcgcaagaggccacccagcagcacggcacgcaaggtttcgcggtgctgagctatgtgtatgaacacgaaaaacgcgacttagccagccgcattgtctccacccagcatcatcaccacgacctctccgtcgccacgctgcatgtgcacatcaaccacgacgactgtctggaaatcgccgtgttgaaaggtgacatgggtgacgtgcagcattttgccgatgacgttatcgcccagcgcggcgtgcggcacgggcatttgcagtgcttgccgaaggaagattgagttacgccattgtcccaatcgtcttcctgaatcgcagcagcgcaatggtgaaaaatgcgccgccaattgccatcagcgtcagaaactgcggccagacgatttcgaatccggcaccccggtagaggatggcctgcgcgaggctaacaaagtgtgtcgtcggcatggtcagcataatgtcctgcaccatctgcggcatactttcgcgcggcgtggaaccaccggaaagcatttgcagcggcagcagcaccagaatcaccagcagccccagttgcggcatactacgcgctatcgtccccataaaaatgccgatactcgtggtggcaaacagactgagcgccacgcccagcataaacagcgggatgctgccttcaatcggtacgcccagtacacctttcaccatcagcaccaggcttaatccgcttaccaccagcaccaccagccccatgctccagatcttcgccatcatgatctcaaacggcgttatcggcatcaccagtaagtgttccaccgtgccgtgttcacgctcgcggatcagcgcgcttccggtcaatacaatcgccagcatggtaatgttgttgatgatcgccatcaccccgccaaaccacgcgggatcgaggttcgggttaaagcgcatccgggtttccaggcttaccaacggttcgctgttatcacggtagcgcgcgacaaagctgttcacttcaccgttgataatattctggatatacccattgccggtaaatgcctggctcatgcgcgtggcatcgacgttcacctgaatatccggctggcgtccggcgaggacatcacgctgaaaattaggcggaatatttatcgcgaaggtatagcgtccggcgtccagtccggcatccatctcatcggcggtgatcatctccggtggcaaaaaccacggacgatagaagctgttaacgatccggttgcttaactggctttgatccatatcggcaatggcgatcggcgcgaggttcaagcttcctggcgtaacggtcgcactgctatacacgctcaccgtaaagctgaagacaatcagcgtcagcatcgctttatcaccgagcagactgcgcaactctttgatacccagattaaaaatattgcgtaaatggcgcatcatccctcctgttttttcagcagcaggatacttaagcccatcaccagcgggatggctatcagtaacgggataaaaagttgccacaaatcagtcagatccagcgctttgctgaacgtcccgcgggcgatagtcagaaaatgactggtcgggtaaacctcgccgatccaacgtccaggcccttccaggctagctaccggatcgatcatcccggaaaactgtgtcgccgggatcaacgtgataatcgccgttccgaaaatggcggcaatctggcttttcataaaggtggagatcagcagccccattccggtggcaatgatgatatacagcagcgccgccagggtgagcgtcaggaaactgcctttatgcggtacgccaaacacaaacacgctcaggccgcagagcaggaaaaagttcagcatccccagcgcgatgtatggcaactgtttaccaagcaaaaattcactacgcgtggtgggggtcacgtaaaggttgataatgctcccaagctctttttcccgcaccacgctaagggcgcttagcatactcgggatcatcatcagcagaagcgggatcaccgccggaacaatcgctggcaggctttttacgtccgggttatagcgatagcgcgtctcaatattcatcagcccgctttggctggcgggtgtgctttgtcggctcgccacatcctgtaaccagctctggtgcatggcctgcacgtaaccttttaccgtttcagcacggctcggcatcgctccgtcgatccagacgccgagttccacaggcgtaccacgcgcgatatcgcgcccgaaattgggcgggatctcaatcgccaccgtgatatcgcccgcacgcatccgacgatcaagctcgtcataactggtgagcggcggctgttcgataaagtaacgggaaccggagaggttgagtgtccacgcctggctactgacggtctggtcgcggtcgagcaccgcaaagcgcaggttttccacatccatactgatgccgtaacccattatcagcatcaggatcaccgttcccatcagcgccagcgtgctacgtactggatcgcgtcgcagttccagcgcttcgcggcggctgtagctaaacagacggcgcaggctaaatccctgacgcggcgcgtgggtggtgtcgtgtaccacgggcggcgcttcggcttcgttgctctgccctgccgcttcctgcaaataggcgataaatgcctcttccagactggcggctccgcgtttctcaaccagttcctgcggtgtaccgctggcaagcacttttccggcgtgcatcagactgatgcggtcgcaacgttccgcttcgttcataaagtgggtggagatgaagatagtcactttgtcctggcggctgagatcgaccatcaactgccagaacatatccctcgccaccggatcgacaccagaagtaggctcatcgaggattaacatctccgggcgatgaatcaccgccaccgccaggctaagccgctggcgaatgccgagcggcaaactctccggcagaatatcttcaacgtcgttgagcttaaaacgctcgctcatttcagccactcttgcgggaatttccgcttccgggatgtgaaacaaacgggcatgtaactcaaggttttgccgcacggtgagttcgttatagaggctaaacgcctggctcatatagcccacccgacggcgggtatcgatatcttttggatcaaccggttgcccgaacagccacgcctcaccttcgctggcgggcagcagtccggtgagcattttcatggtggtggatttaccgcagccgttgctaccaagaaaaccaaaaatctccccgcgtggaatgcggaaattaacgtgatcaacggcaacgaaggaaccaaaacgcatggtcagatcgcgcgcttcgatggcaatctctgcgttttcaggttgatacggtgggatcactaccgcctgatgcgcctggcgttgcgcttgcggtaacagatttataaatgcttcttccagcgtagcgctttgcgtttgctgccgtagctcttcggcgctgccagttgccagcacttctccggcattcatcgctaccagccagtcgaagcgttcggcctcttccatataggcggtggcgaccagcacgctcatattgctctgccgctggcgaatactgtcgatcagatcccagaactgggagcgggagagcgggtcaacccccgttgttggctcatcaaggatcaacagttccgggtcgtggattaacgcgcagcacagcccaagtttttgcttcatcccgccggagagtttccctgccggacgatcgcgaaacggtgctaacccggtgctggtcagcagctcattgattcgcacttcccgctccgctttgtcgtgaccgaacaggcgagcgaaaaaatcgacgttttcatacacgctcaaggtgtggtagaggtttttgcccagcccctgcggcatccaggcgatgcgcgggcagacgtcgcggcgatgcttcgggtcgcgcatatcgccgcccagcaccatcacattgccctgttcaatgacgcgggcaccggaaatcaagctcaacaagctgctcttcccgacgccgtccgggccaatcagcccgaccatacagcgggccggaatatcgagagtgatattgttcagcgcaacggtttttccataatgctggctcacgcccgccagttgcgcgacaggcgggacgggaaccagttccagatgcgtcattgcggcaacctcaccacgaggtcgtcaggccacggaagttcttcattcacccgcacccacgctacgcccggcaaaccggttttgacatattccagatgctgctggagtaattccggtgggatacgcgctttgacgcggaacatcagtttcagccgttcatcgctggtttcgacggtttttggcgtgaactgggcgacactggcgacaaaactgatggttgcaggaatacgcagatctggcgcggcatcgaggatcagccgggcttcaccgcccagtttcagcgtgcccgcctgttcggttggcaggaagaaagtcatatagacgtcgctgagatcgaccatattcagcacccgaccgcctgccgccagcacttcgcctggctcggcaacccgatactgcacgcgtccgtcacgcggggctttcagttcgctgtcatcgatatctgcggcaatgcgccgttcagtggcttgtgccgcttcgacgcgggtttgcgcctgaatgatattggtgcgtgccgcttctatagccgctttagaagcgcttacctgagctttcgcgctttccagcgcagctcgggcgctctcagcggcggcgcgatcgtcatccagctgttgcgcagaaatagcccctcgttgggccagactacgggaacgcgtatgacgttttgctacggagtccagttctgcctggcgttgattaaccaggctctgtgcggcacgagtttcgctttgtcgttgctccagcaaagcctgcgcggcagcaacggcgctttgtgcctctttgatttgcgcgatggcttccagtcgctgttcctgcaacacgcgagtatccatcttcgccagcacttcaccttcgcgaacaaacttgccttctttcaccagaatggtgtcgatacgcccggcaattttgctggcaatatccacttccgtcgcttcaatgcgcccattactgacagcaaagccttccggcacacctgccgggcgcaacagccaccacgccacgatagccgccaccgccagtaacccgacaacccaccacgccagatggcgcttactcttatccataatcgacccgccataatccctgtaagcaaacgacgcgtgttacaactgccgccgaacgacgttcagcggattcttccatccgggataagaaggaaacggcaaatacgaccagcgcgcagagcattgagcgccaacggggaaggcttagtgaaaacgggtagtaatgttgtcatcatcagcattcctggccgtaaatgaaacacgcatactcataagtgtgatctataaaactggctgacaaaacggtatccatcctgttggatagcgtttcacgcctgttcagttgcaggaacagagcattcctttttacgttttatcaacagtctcaaccagatagtaacattaatattcatgttgtctatggttcagagctgtaacattgtgcgccttctaatcaaaggcataagtccatttctgtttttttcatgctggtaagacttccagggagtggttatctcaggccctgcaccagggttaatttggcaattatgcatgctgaacattcttccagcatgtttactgtcacgggcgttaagacctaaaactgtccccgtttcgcctatgcgttctcttccaccatttccgttatgtgcaacaacttgatttatacctaacatttgactacatgctaatagtgcttcaagtttaggtctgtaatctgtgctaacagaaaaataacgattaaaggatcgacaagagatagcccggctagttttaaactttttgccattaattatagcatgatgctttttattgataattgccgctaattcgaccggatcgagagcattggtcatttcatcaatagagactgttatcggtcctataatgtaacgttttcgctgatcatcaaaagttatcccatgatgatttgccattattttgtatttggggtcatagaaacatacaggataatcttttatcccagagtaggtatcctcatcgagtggtttcatacgcgtgaagttctgcatatagttaccattgcaattcgtttcatgatttccagctaatacatgaacattttcattgatactcattatgcgttttaacaaatcgatgataaattgatcaccacagatattgctaaatcgatcgccggtttggtcgcccagaaacgtacatggcgtcacagcgtctttattaataactaaataaggctgaagactttctaaaataatgtctcttctgttcaggatactgattattgtattaacattagtgttaagttgctcattaaagttctcccttagcaatacgttgagaacttcatcttctatattaagcaactggctaaggaaattttctccttcagccatgattcccaaatgtcccgttgcgaaaagcgcgaacaaaactgcaccgacactgccatcggtatcaccaaaataggttggtctggtacttgtgggatcaacgggtaaacaattggagaaatagattctgtcagcgaactggggttttatcattgtttcgaatttaatatcagatacattatattggcttattttccagttccagatgggtttgtagctctcagtaactgcaacatcattagcattatcatttactgtcatattattaagtaaataaacaatactgcaccaattaatatcggtattatcaagagagcaaccgtaatttttgctattaattgtcacaataaactgataattattattcctacgtagaatatgagcacgcatgccgcttagcatactatatttttcactatgatccgtttgtatggtaaaactaattttgtcatcttgaatagattgttggaaccgttctatttgccaatcatctattttttccacaacctcaccgagcattgtcctggcaatactacttatatcatcacctataccatttgcaatatacccaaacagttctttagtgaagttggtaacatgctcttgcaccatatcatttgttgcgattgtcgttgtactgtcgttagtgcctgccacagttccaattttcatattttacctcatattatttaccgcgaggaatacatagttaacattttatcttatgacatacacctcatgttcgatgggaaaataattatattttgcacaaatcattcagcctcaaagcataatatgaaatttcttatctcatagcagagaaagtccctaaagattgtagaggcgtcatcagaacatgcctctacaatcgattaagaaaacctatgaaatactggcaggattaaaaagacataccaccgtattcatggagttttaatgtagttgaaaacaactaagcccactggaataaattattttattatttttatcacgtgcttccttcagggaatttagccccataataccattatcaaattgttgattatgatctaccccgggcccatgatgcccatatttttgtctaatgtatttgctggggtcttcacctttgagtgtctccccacatatgaagatacgttcacgtgctggtctgaaatcagtagtgttatcaaaataattagcatatacaggtgtgggtttcaaagtattgcttcggattagatggaatagaggatcatccatgtgttctttatgttttttattaaaaatattggctaattcctcaggatcagtaggatttttcatctgattaaatggaacctgcaaagcacgctgacaataacatttttttcttcatctcttattattccgtgatgactggttaaaacttgcctttcactgtcataattacaaacatcgagcgttttaattaagttatacgtatcaccggcagagagtttatgatttgctagtcgtgcagtatagttaccattaaaattgatttcatgatttccagccagaacgacgacatttttattaatacggctatctttattaccctccatatttcgcatagaatttagcaaagtaaggatatatttatcaccaaaaatagtactaaatctatcgcctgtatgatccccaaggaagatacaaggggttatcgcatcgtcctttaaaaaaacatgttgatgcaactcattcaagatcatgtctctcgtatttaataaatcgtagagcactttattatttttatgtttgtatgcagaactagccatctcttcgtgttttaataattcacataataaactccaacccttttccctgatgcctatatgcccactaacgagcaatgcataaagtacagcgcctactcttccatctgtatcgccaaaataagccgtgttggcattttgtgggttaatcacaccacactgtttatagaagtctattttactaaacacagatttaacatagctatcaaacttttccttagtaaacgtctctttagagacatcccaacgccagtcaggtttgaaattaccactaagaagagtaaagaaatttctcgctatgatagaaagcccatcaactttataaattatatcacttttatctccagaggaattaataaaataataaccgcccttacactcaacagtaacggtaatgggagagcttaattttaacacatggttattgtctggtataattgtaaagataaacgtatcagtagtattgtcggcgaatctattatattcttgaatatctatagaaggttcactattataaaaccatactttctccatctggtgactacgatcatttaccttccagtgaccatgttgcaggaaatagatgatatgcaggccaaaatcgttatctatttggctatcattatccagtttatcaaattcaactatctttgcacgatgtgttttatcaaccttgccatggtgttgatgactgttaactttatcactatgcttatcttgatggctactagagatgtttctaatctgattgtcaattgctttcataaataacctgtgatatttttgaattgtttgtaacaaaataaatgatacttgtctgaaaaacagatttacgacgatataaaataataatacttatatgttcgctgattttaagcaccgagactatccggtcttttaccaaataatgaagaataatccctccctggaagataattgtaaaaaacaacagcataagaattaatcttaggataaatttttatttatcatggccttttgaacgctgaaaagtagcgctctgcaaagtaaaccccgctatagttatgctatgcatttgtctttaatgatatctcgtcattatattaacaggatgaaattatcattaatgcatatttcaatattagcagggatacctgaggagtttaaagtgaacatatatatcgggtggcttttcaaattaatccctttgattatgggcttaatttgtatcgcgttaggtggctttgtgctggaaagtagtgggcaaagcgagtatttcgtcgcgggtcatgtgctgatttctctggcggccatatgcctggcattattcactaccgcatttattatcattagccagctcacgcgcggcgttaatacgttttacaatacattgttccccattattggctatgcggggagtattatcaccatgatatggggttgggcactgttagcaggcaatgatgtgatggcagacgagtttgtcgccggccatgttattttcggcgttggtatgattgccgcctgtgtaagcacggtggcagcgagttccggtcactttctgctcattcccaaaaatgcagcggggagcaagagcgacggaacaccggtacaggcttattctagtttaatcggtaactgcctcattgccgttcccgttttactcaccctgctcggtttcatttggtctattacgctgttacgtagtgctgacataactccgcattatgtcgcgggtcacgtattgcttgggttaaccgcaatctgtgcctgtctaattggccttgttgccacaattgtccatcaaacacgtaatacgtttagtactaaagaacactggctgtggtgttattgggttatttttctcggcagtatcacggtactgcaggggatatacgtcttagtcagttccgatgcaagcgcccgactggctcccggcattattcttatttgcctcggaatgatctgttacagcatattcagtaaagtctggctactggcactggtatggagacgtacctgtagcttagccaacagaataccgatgattcccgtcttcacctgcctgttttgccttttcctggcaagctttcttgcggaaatggcgcagaccgacatgggatattttattcctagccgagttctggtcggtttgggagcggtatgctttacgttgttcagtatcgttagtatattagaagcgggttctgctaaaaaataattgcaacgtaccggataaaaccagcgttgaccatttgcgtaacgctggtttttcttaggcatcatgaaataacgcagcattaatgcatagtggttaagtataaaaaacagcaaagttactgtttttttcaacctgttcatatttcataaagatctggccactgagtgagttttcaatcacctttccatccaccttatattaagcatggagggtttcagttcacgggctcattagaaaataatcacaagataaccactatcaaaattagctcatttttaatgcgactctaataattttcatctttaggaaataggtcaggagctctttgctgcaatcaaatcctgcgcacaagcccacgcactgctccacgcccactggaagttatagccccccagccagccggtgacgtccatcacttcgccgatgaagtacagcccaggcactttgcgcgcttccatcgtccgactagagagttcgttggtgtccacgccgccgagcgtcacttcggcagtgcgatagccttcagtgccgttgggttgtacgcgccagtcggtcaatgtgctaatcagtgcctgttggtcacgcacgttgagctgttttaggctaacatccgggatttgcccgagttgctgtaagcgttcaaccaaccgcttcggtagatgaaccgccagtgtgtttttcaggctttgattcggatgtgcgttacgctgctcattcaggaaggtttcgaggtccacatccggtagcagattgatgctgacaaattcccccggttgccagtagctactaatctgcaacaccgccggtccagacaagccgcggtgggtgaagagtaagttctcacggaaaacggtgccgttttcagcggtaatcacggaaggcaccgccacgcccgccagcacctgtaactcttcgagcaacggtttatgcagagtgaatggcaccagacccgcgcgggtcggcagcacgttgaggccaaattgttcggcaatcttataaccaaacgggctcgcgcccagccccggcatactcagcccaccagtcgcgatgaccagcttttcgcaaccgacagtcatgccgttcagatcaagcgtgaagcctgtttcatccttcgccacactcagcacttcgctacgcaatctgaaggtcacattgcccttctcgcactcatccaccagcatgtcgacaatctgctgcgcggagtcatcgcagaagagttgccctaacgttttctcgtgccaggcgatgccgtgtttattgaccagatcaatgaaatcccactgggtaaaacgtgcgagtgcagacttacaaaaatgcggattctggctcagataagcgcctggttcgacataaaggttggtaaagttgcagcgcccaccgccagacataaggattttgcgccctggttttttaccattatcgatcagcagaacccggcgtcctgcctgacctgccagcgcagaacagaacatacccgccgcaccagcgcctataataatggcatcaaacctttccacgttgcgctcctcttagaaaaaacgggcgtgaattgtaaagattcctcagtggtcgcaccagcatcaatattactaaaaggaagtatttgcctgaattatataagataattattttttgagtgaaatccatacagggggcaaatcaaaaaaagtctatatttcactttgcccgcgccgcgaaagtcactgataatgcgccgcgttcatgtcctcaaaatggcgtaacgtcctatgctacatttgtttgctggcctggatttgcataccgggctgttattattgcttgcactggcttttgtgctgttctacgaagccatcaatggtttccatgacacagccaacgccgtggcaaccgttatctatacccgcgcgatgcgttctcagctcgccgtggttatggcggcggtattcaactttttgggtgttttgctgggtggtctgagtgttgcctatgccattgtgcatatgctgccgacggatctgctgcttaatatgggaagctctcatggccttgccatggtgttctctatgttgctggcggcgattatctggaacctgggtacctggtactttggtttacctgcatccagctctcatacgctgattggcgcgatcatcgggattggtttaaccaatgcgttgatgaccgggacgagtgtggtggatgcactcaatatcccgaaagtattaagtattttcggttctctgatcgtttcccctattgtcggcctggtgtttgctggcggtctgattttcttgctgcgtcgctactggagcggcaccaagaaacgcgcccgtatccacctgaccccagcggagcgtgaaaagaaagacggcaagaaaaagccgccgttctggacgcgtattgcgctgatcctttccgctatcggcgtggcgtttagccacggcgcgaacgatggtcagaaaggcattggtctggttatgttggtattgattggcgtcgcgccagcaggcttcgtggtgaacatgaatgccactggctacgaaatcacccgtacccgtgatgccatcaacaacgtcgaagcttactttgagcagcatcctgcgctgctcaaacaggctaccggtgctgatcagttagtaccggctccggaagctggcgcaacgcaacctgcggagttccactgccatccgagcaataccattaacgcgctcaaccgcctgaaaggtatgttgaccaccgatgtggaaagctacgacaagctgagccttgatcaacgtagccagatgcgccgcattatgctgtgcgtttctgacactatcgacaaagtggtgaagatgcctggcgtgagtgctgacgatcagcgcctgttgaagaaactgaagtccgacatgcttagcaccatcgagtatgcaccggtgtggatcatcatggcggtcgcgctggcgttaggtatcggtacgatgattggctggcgccgtgtggcaacgactatcggtgagaaaatcggtaagaaaggcatgacctacgctcaggggatgtctgcccagatgacggcggcagtgtctatcggcctggcgagttataccgggatgccggtttccactactcacgtactctcctcttctgtcgcggggacgatggtggtagatggtggcggcttacagcgtaaaaccgtgaccagcattctgatggcctgggtgtttacccttccggctgcggtactgctttccggcgggctgtactggctctccttgcagttcctgtaatcgtacgcaccaaaacgagcgggtcagctggcccgcttcagattgtgacatagtgcgctttgttcatgccggatgcggcgtgaacgccttatccggcctacaaaaacatgcaaattcaatagattgcagagattatgtaggcctgataagcgtagcgcatcaggcaattttgcgtttgtaatcagtctcgagcgggtcagtttactggcccgctttttttatgcgttattattgctgaagtgcttaatgccaaatcatcaatgcaatcaggctgaccaccaccagaccacacaatgcgctggtcagaataaactgccgacgcacccgctcacagcggcgaataaattcatcatcgtgatgatcgcgataacgttgggcatagatataccaaacgagacgcacctgtttgttgggttggccatgattggtaaaaaagccccctccatcaacatattgatagagcaatggatcgcagttacgcagtaccactaacaacgcgcgtagactactgaaatagcgcgccatgttaacaatgcaaacgacacataaagcccaaaataatgcgacggtgcttatcatacctcctccccggcgacctgcccgcggagttccaccccggggctaccgctcccgatacgctgccaatcagttaacaccaggtcctggagaaaccgcttttgtggtgaccaacatacgagcggctctatagatagtgtaggagatcaggttgttttttttccagaaggttaaccactatcaatatattcatgtcgaaaatttgtttatctaacgagtaagcaaggcggattgacggatcatccgggtcgctataaggtaaggatggtcttaacactgaatctttacggctgggttagccccgcgcacgtagttcgcaggacgcgggtgacgtaacggcacaagaaacgctagctggccagtcatcgacaactttatggaaggagtaacactatggcttataaacacattctcatcgcggtcgacctctccccggaaagcaaagttctggtagagaaagcagtctctatggctcgcccctacaatgcgaaagtttctctgatccacgtagatgtaaactactctgacctatacaccgggcttattgatgtgaatctgggtgatatgcagaaacgcatctctgaagagacacatcatgcactgaccgagctttccactaatgcaggctacccaatcactgaaaccctgagcggcagcggcgacctgggccaggttctggtcgatgcaatcaagaaatacgatatggatttggtggtttgtggtcaccaccaggacttctggagcaaactgatgtcttccgcacgtcagctgatcaacaccgttcacgttgatatgctgattgttccgctgcgcgacgaagaagaataatcttccctctacgacgtgttcctgaacgcccgcatatgcgggcgttttgctttttggcgcgccttgttacctgatcagcgtaaacaccttatctggcctacggtctgcgtacgcaatcaaaatccccagccaatacaacatttaacaccatcatattttccatcattagtgtgatcatctggttattttctgttgtaatagtgtattaatctattcaccgcatcaatattaagaatctctgacagatgtaaactttttcgcgcgttatcccttacgcgttcatacttttcaggatggtattggaaggttaataaatatgaatacaacaacacccatggggatgctgcagcaacctcgcccatttttcatgatcttttttgtcgagttatgggagcgattcggctactacggcgtgcagggcgtactggcggttttcttcgttaaacagcttggattcagccaagagcaggcttttgtcacttttggtgcttttgctgcgctggtctatggcctcatttccattggcggctatgtcggcgaccacctgctggggaccaaacgcaccattgttcttggagcacttgtgctggcgattggctacttcatgaccggcatgagcctacttaagcctgacctgattttcatcgccctggggactatcgctgtcggtaacggcctgtttaaagctaacccagccagcttgcttagcaagtgctatccgccgaaagatccgcggcttgatggcgcattcaccctgttctatatgagcatcaacatcggcagcttgatagcgttaagcctggcccctgtgatcgctgatagattcggttatagtgtcacctacaacctgtgcggggcggggttaattatcgcattactggtttacatcgcctgtcgtggaatggtgaaagacattggttctgaacccgacttccggccaatgagcttcagcaaactgttgtacgtgttacttggcagcgtggtgatgatcttcgtatgcgcatggctgatgcacaacgtagaagtcgccaatctggtgctgattgttctctccatcgtcgtcaccatcatcttctttcgtcaggcattcaagctggataaaaccgggcgcaataaaatgtttgtcgcctttgtcctgatgctcgaagcggtggtgttttacattctctacgcccagatgccaacaagcctgaacttctttgccatcaacaacgtgcatcatgaaattctcggtttttccatcaacccggtcagcttccaggcgcttaacccgttctgggtggtactcgccagcccaatactggcaggcatttacacgcatctgggtaacaaaggcaaagacctcagcatgccgatgaaatttactctcggcatgtttatgtgcagtctgggctttttgacggcggcagctgcgggaatgtggtttgcggatgcacaagggctgacaagcccatggtttatcgtgctggtgtacttattccagagcttaggtgaactgtttattagcgcccttggcctggcgatgattgctgccctggtgccgcagcatttgatgggctttattctcgggatgtggttcctgacgcaggctgccgcgttcttgctgggcggctatgtggcaacatttaccgcggtgccggacaacattaccgatccgcttgagacgttgcccgtctataccaacgtgtttggtaagattggtctggtcacgctgggcgttgcagtagtgatgctgttgatggtgccgtggctgaaacgcatgattgcgacgccggaaagccattaattattcttgcagaaagcagggtagcgttatcgctaccctgttttagttttacactggcgtacctgcatagatatcaaagcgatgccctttagtgactaccgcgtttggcgtggcgacattcgccagcggtggcgcgtagtccgggcgctttaccaccacgcgtttggtcgccagcaagcgtgcaggctccagtaatccatcggcatcaagatccggtcccaccaggctctgaaagacacgcatctcttttttcactagcgcgcttttctgcttatgcgggaacatcgggtcgagataaaccacctgcgggcgcggggtaatatcagtcagcgccgtcaggctggaggcgtgaattaactgcaaccgctcctgcaaccagccgccgatttccgcatccgcataaccacgcgccaggccgtcgtcgagtagcgcggcaaccactggattacgctccagcatccgcacgcggcagccgacactagccagtacaaaggcatcgcgcccaagtcctgcagtggcatccaccacatccggcaaataatcgcctttaatgcccaccgctttcgccaccgcctcaccgcgaccaccgccgaatttgcgtcggtgcgccatcgctccgccaacaaaatcaacaaagatgccgccaagttttggctcatcacgcttgcgcaattccagatgttccggcgttaacaccagcgccatcaggttgtcttcatcgtgctccagcccccagcgggccgccagaacagataaggcaccgtctccggtgcctgtttcatcaattaagcagattttcactgaatgatcagcccttaatgccgtaatgctccagcatcgcatccagctgcggttcacgaccacggaagcgtttgaacagatccatcggctcttcactaccgccacggctcagaatgttgtcgaggaagctctgcccggtttcacggttgaaaatgccctcttcctcaaagcggctgaaagcatctgccgccagtacgtcagcccacaggtagctgtagtaacctgcggcataaccaccggcgaaaatatggctgaaagcgtgcgggaaacggccccaggacggagatggcaccacggcaaccagtttcttgatttctgccagagtttcgaggatttttgccccctgatccgggcggaactcggcatgaaggcggaaatcaaacaggccgaactccagctgacgcagaataaacagcgccgcctggtagttcttcgccgccagcattttatccagcaactctttcggcagcggttcgccggtttcatagtgaccagagataaacgccagcgcctccggctcccagcaccagttttccataaactgactcggcagttcgaccgcatcccacggcacaccgctgataccggaaacaccagcggtttcgatgcgggtcagcatatggtgcaggccgtgaccgaactcgtggaagagggtgatcacttcgtcgtgagtgaacagcgccggtttaccatttaccgggcggttgaagttacaagtcaaatacgcgaccggtttttgcaaagaaccatcagctttacgcatctggcctacgcagtcatccatccacgccccgccgcgcttgttttcacgggcatacagatcgaggtagaagctaccgcgcagttcgttattttcgtcatacagttcgaagaaacgtacatccggatgccagacatcaacatctttacgctctttagcggtgatgccgtaaatacgcttaaccacttcaaacaggccgttaaccgctttgttttccgggaagtacggacgcagctgttcgtcactgatgctgtagaggtgctgtttttgtttttcgctgtagtaagcgatatcccacggctgcaactcatcgacgccaaattcggctttggcaaaggcacgcaattgcgccagctctttttcgccttgtggacgcgcgcgttttgccagatcggttaagaaatccagcacctgctgcgggttttctgccattttagtggcaagggatttaaaggcgtagttttcaaagcccagcagttgcgccagttcgtgacgcagcgcgaggatctcttccatcaccttgctgttatcccatttaccggcgtttgggccttgatcggaggcgcgggtgctgtaagcgcgatacatctcttcacgcagagcctggttgtcgcagtaggtcattaccggcaagtagcttgggatatccagcgtcagcaaataaccttccagctctttcgcttcggcctgggcttttgccgcagccagcgcgctttctggcatccccgccagctccgcttcgtcggtaacgagtttggtccagcccattgtcgcatcgaggacgttgttgctgtactggttgcccagttcagaaagacgggtcgcaatttcgccgtaacgctgctgtttctctttcggcagacctatgccagagagttcaaagtcgcgcagtgcgttatcaaccgctttcttctgcgccgtgttcagcgtggcgtaatgatcgccatcgcgcaggtcgcgatacgctttatacagcccttcatgttgccctacccaggtgctgtattcgctcagcagcggcagggtttgttcgtaggcttcacgcagttccgggctatttttcacgctgttcaggtggctgaccggggagaagatacgccccaacacatcgtccacttccgccagcggctggcagagattttcccaggtgtacggtgccccttgcgctactacgcgctccacgttttcgcggcagtcgttcaatgccttagtcacggctggaacgacatgttccgggagaattttagaaaacggaggcaattcaaagggagtcagtaacggattcgtcattcgcgcagtcctggttaaagaggttaaggaagcgctcaacaggcgctttacataatgtgtgtagcatggggttaagtgtagtgaatttcaatgagaaacgttacgctttcgcggcggcggcctcttttcggtatactgtcctgatacgcttttgtgcgccccgaatacgggccgatttttacttaccggaacacctttacccatgctcagttatcgccacagctttcacgctggcaaccacgccgacgtccttaaacataccgttcagagcctgatcatcgagagcctgaaagagaaagataaaccgtttctctatctcgacacccacgcaggggccgggcgttatcagttaggcagcgaacatgccgagcgtaccggcgaatatctcgaaggcatcgcccgtatctggcagcaggacgatttgcccgcagaactggaggcgtacatcaatgtggtaaaacacttcaaccgtagcggtcagttgcgttactaccccggtagcccgttgattgctcgcctgctactgcgtgaacaggacagcctgcaactgaccgaactgcacccgagcgattacccgttgttgcgttctgaatttcagaaagatagccgtgcgcgtgtcgaaaaagccgacggtttccagcagcttaaggccaaactgccgccggtttcccgccgtggtttaatccttatcgacccgccgtatgaaatgaaaactgactatcaagcggtggtcagcgggatagcagaaggttacaaacgtttcgccactggtatttacgcactgtggtatccggtggtgctgcgtcagcaaattaagcgcatgatccacgatctggaagcgaccggtattcgcaaaattctgcaaattgaactggcggtactgccagacagcgatcgccgtggcatgaccgcttccggcatgattgtgattaacccgccgtggaaactggaacaacagatgaataacgtgctgccgtggctgcacagcaaactggttccggcaggcaccgggcacgccaccgtaagctggatcgtgccggagtaattgcagccattgctggcacctattacgtctcgcgctacaatcgcggtaatcaacgataaggacactttgtcatgactaaacactatgattacatcgccatcggcggcggcagcggcggtatcgcctccatcaaccgcgcggctatgtacggccagaaatgtgcgctgattgaagccaaagagctgggcggcacctgcgtaaatgttggctgtgtgccgaaaaaagtgatgtggcacgcggcgcaaatccgtgaagcgatccatatgtacggcccggattatggttttgataccactatcaataaattcaactgggaaacgttgatcgccagccgtaccgcctatatcgaccgtattcatacttcctatgaaaacgtgctcggtaaaaataacgttgatgtaatcaaaggctttgcccgcttcgttgatgccaaaacgctggaggtaaacggcgaaaccatcacggccgatcatattctgatcgccacaggcggtcgtccgagccacccggatattccgggcgtggaatacggtattgattctgatggcttcttcgcccttcctgctttgccagagcgcgtggcggttgttggcgcgggttacatcgccgttgagctggcgggcgtgattaacggcctcggcgcgaaaacgcatctgtttgtgcgtaaacatgcgccgctgcgcagcttcgacccgatgatttccgaaacgctggtcgaagtgatgaacgccgaaggcccgcagctgcacaccaacgccatcccgaaagcggtagtgaaaaataccgatggtagcctgacgctggagctggaagatggtcgcagtgaaacggtggattgcctgatttgggcgattggtcgcgagcctgccaatgacaacatcaacctggaagccgctggcgttaaaactaacgaaaaaggctatatcgtcgtcgataaatatcaaaacaccaatattgaaggtatttacgcggtgggcgataacacgggtgcagtggagctgacaccggtggcagttgcagcgggtcgccgtctctctgaacgcctgtttaataacaagccggatgagcatctggattacagcaacattccgaccgtggtcttcagccatccgccgattggtactgttggtttaacggaaccgcaggcgcgcgagcagtatggcgacgatcaggtgaaagtgtataaatcctctttcaccgcgatgtataccgccgtcaccactcaccgccagccgtgccgcatgaagctggtgtgcgttggaagcgaagagaagattgtcggtattcacggcattggctttggtatggacgaaatgttgcagggcttcgcggtggcgctgaagatgggggcaaccaaaaaagacttcgacaataccgtcgccattcacccaacggcggcagaagagttcgtgacaatgcgttaaatgttaaagggctaagagtagtgtgctcttagcccttaattacgtttccgctatcagttcagaagctgaagcagaaagcggatcagttccagcagcgcaattaacgcccctagaacgatgattgctttatcaatcacccgttttctccatgcgatggagtgagaatgcatccgcttactcatccactgcctgtcacggcgcatgtctcattgttagataagaactctctcactccggccagagcatcagttaacggcaccacccgtacttctgaccaggactttgaaagcgtttatgcgcattgccagagtgaaaatgcctcagagctaactggataatcatacagtacatgcaggttataaaaccagcacgtccttgcaatagtttcagtatggtattagcattgatgcgttagatgatggctatctcactccagtcagagccaccaactcagggctggaaagtaaaaaaccgacgcaaagtcggtttttttacatccggattcggacaaggcttaatatgacgatgacccagtgaaagtatataaatcgtcactgcgatatataccgaagtgctccctccgccagctgaagaaatcgctaattcttgcaatgttagccactggctaatagtattgagctgttagataagaactctctcactccagccagagccaccaactcagggctggaaagtaaaaaaccgacgcaaagtcggtttttttacgtcctgattcagacctcctttcaaatgaatagccaactcaaaattcacacctattaccttcctctgcacttacacattcgttaagtcatatatgtttttgacttatccgcttcgaagagagacactacctgcaacaatcaggagcgcaatatgagttttctgttacccatccaattgttcaaaattcttgctgatgaaacccgtctgggcatcgttttactgctcagcgaactgggagagttatgcgtctgcgatctctgcactgctctcgaccagagccagcccaagatctcccgccacctggcattgctgcgtgaaagcgggctattgctggaccgcaagcaaggtaagtgggttcattaccgcttaagtccgcatattccagcatgggcggcgaaaattattgatgaggcctggcgatgtgaacaggaaaaggttcaggcgattgtccgcaacctggctcgacaaaactgttccggggacagtaagaacatttgcagttaaaaatttagctaaacacatatgaattttcagatgtgttttatccgggaggcattatgttactggcaggcgctatctttgtcctgaccatcgtattggttatctggcagccgaaaggtttaggcatcggctggagtgcaacgctcggcgcagtactggcgttagttacgggcgtggtccatccgggtgatattccggtggtgtggaatatcgtctggaacgcgacggctgcgtttatcgccgtcattatcatcagcctgctgctggatgagtccggcttttttgaatgggcggcgctgcacgtcagtcgctggggtaatggtcgtggtcgcttgctgtttacctggattgtcctgctcggtgctgccgttgccgccctgtttgccaatgatggcgcggcgcttattttgacaccgattgtcatcgccatgctgctggctttagggttcagtaaaggcactacgctggcgttcgtgatggcggccggattcattgccgataccgccagcctgccgcttattgtctccaacctggtgaatatcgtttccgctgatttctttggcctcggctttcgcgaatacgccagcgtgatggtgccggtggatatcgccgcgattgttgccacgctggtgatgttacatctctattttcgcaaagatattccgcagaactacgatatggcgctgctgaaatctcccgcagaagcgatcaaagatcctgctacgttcaaaactggctgggttgttttactgcttctgctggtgggatttttcgtcctggaaccgctcggcattccggtgagcgccattgcagctgtgggcgcgctgatattatttgtcgtcgctaaacgcggtcatgcgattaatacgggtaaagtcctgcgcggtgccccctggcagattgtcatcttcagcctcggcatgtatctggtggtttatggcctgcgcaatgccggattaacggaatatctttctggcgtactcaacgtgctggcggataacggcctgtgggccgcgacgctcggcaccggattcctcaccgccttcctctcttctattatgaacaatatgccgacggtactggttggcgcgttgtccattgatggcagcacggcatctggcgttatcaaagaagcgatggtttatgccaatgtgattggctgcgatttgggaccgaaaattaccccaattggtagcctggctacgctactctggctgcacgtacttagccagaagaatatgactatcagctggggatattacttccgtacagggattatcatgaccctgcctgtgctgtttgtgacgctggctgcgctggcgctacgtctctctttcactttgtaatgagatactgatatgagcaacattaccatttatcacaacccggcctgcggcacgagccgtaatacgctggagatgatccgcaacagcggcacagaaccgactattatccattatctggaaactccgccaacgcgcgatgaactggtcaaactcattgccgatatggggatttccgtacgcgcgctgctgcgtaaaaacgtcgaaccgtatgaggagctgggccttgcggaagataaatttactgacgatcggttaatcgactttatgcttcagcacccgattctgattaatcgcccgattgtggtgacgccgctgggaactcgcctgtgccgccctagtgaagtggtgctggaaattctgccagatgcgcaaaaaggcgcattctccaaggaagatggcgagaaagtggttgatgaagcgggtaagcgcctgaaataaagcggcgatatcccccccacaggttgttagaaaagtgcgctttatttatgtcggatgcgacgctggcgcgtcttatccgacctacaaagttatgaaaattcgatgaatagtatgttatttgtaggcctgacaggcgtagcgcatcaggcgattttgctatttacacagtactccctgcgtgagattccaattatcgcgtccagcatggtgtatcagtgagctgcttagttatcagcgatacagcgcagtagtttaaagacgtactggattatgatttatcagtggtttacacaacaaattattaaataattataagataccttaacccattttattattacacatctaaaacatcacaaaaaaaatcacttcacacactatcagagaacataataactttttaaaatgagcgcattttgatagttgttaacgatttcctttacgatactatcactaccctttttttacacacaaatattaccgggtggagataaaagggaaatcaaaggtaattatatcaggaagatataacgcattacatttattgtgtgtagaagaaaatccattcctgttctaattatccaatttaaacatcttagcataaaacaaatgatgaataaggaattttatattgattattagcactttataatcattgaataaaaatagattttatgtacttttaaaacaatgcactatattatggggtgatggatattcatgtcacgccccaaaattaactgagttcacctaaacagaaaggatataaacatcagacaggtttacgttactatcaggcatatcacctcagaatcagatgaaaactataaagaaatatctattatggttttaatatttgttgataaggatagtaacatgaacatgacaaaaggtgcactcatcctcagccttagttttttgcttgccgcatgtagtagtattccgcaaaatatcaaaggcaataaccaacctgatattcaaaaaagttttgttgctgttcataaccagccggggttatatgttggtcaacaagcgcgctttggtgggaaggttatcaacgttatcaatggcaaaacggatacgttgttagaaatctctgtattaccgttggatagctatgcgaagcctgatattgaagccaactatcagggccgactgctcgccagacaaagcggcttccttgatccagtgaactatcgtaatcactttgttaccatcctcggcaccattcagggtgaacaacctggctttatcaataaagtcccgtataacttcctggaagtgaatatgcagggcatccaggtgtggcatttgagagaagtggttaataccacctataacctgtgggattacggctatggtgcattctggccggaaccgggctggggtgcgccttactacaccaatgcggtgagtcaggtaacacctgagctggtcaaataacaccaccgaaagatgcagatgctttctcagcatctgcatcatgcattacatcaaattaatacacagtaagctaactattattattataagccctgtcctgttaattacctttggcaaactgattataaagttaatgtccgcaccaggagtcggttatgtttcttataattaccagggatacgatgttcttcaccgcgatgaaaaacattctgagtaaaggtaatgtcgttcatatacagaacgaagaagagatcgacgtaatgttgcatcagaatgccttcgtcattattgatacattaatgaataatgtatttcattctaattttctcactcaaattgaacgattaaaacctgtccatgtcattattttctccccctttaatattaaacgctgcctggggaaagtgccggtgacctttgttccgcggactatcactatcattgattttgtcgcactcatcaatggcagttactgctctgtgcctgaagcggctgtgagtcttagccgcaagcaacatcaggttctgagctgcattgcgaatcaaatgacaacggaagatattctggagaaactgaaaataagcctaaaaacgttctactgccataaacacaatatcatgatgatcctcaatcttaagcggatcaatgagctggtacgccatcagcatattgattatctggtgtgaatttcaggcttacggtgagtctggctacgctgccacacagattagctaatactaacgcctttcacccctgccataccttttaataatcgcaacaggtcttctatgctcgttgtggcatgaagctggatatcaatggcgaccacttcatgatcttcattttcctgcaagctaactaaatcagtttttattttttgctgcttaaaccagtcgagcatacttaccgtattaccgttcactaatgtcagctgtaaatggtaatttttgttcatcaggcggaaggttaattgatggaagacttccagcaccaacaaggtcatcacactaccataaatacccagttcgtacataccgctgccaataaccatacctatggcggcggtcacccagatatccgctgccgtcgtcagacctacaatattttggttacgaacgagaatgttacctgcaccgataaacccgacgcccgtcaccacctgagcagcaatacggctggggtcgagtccgacgtgatctaaagacagcacgtcagcaaaaccatatttgctaacaatcataaacagggcgcttcccatgccaattaatacatgtgtgcgtaaccctgctcctttgccgcgcatttgcctttccatgccaatagcgccacaggcaattgccgcgagtataagacgtataataaattctgctgtcatataaaaatgcaaaaaggagcagcaagatggctcaacttgctactcctttttacttgcacctcattaattcggcaagtcattagatgcttgatttttgaaggtatacaaatttttctgcgggtttttcttacagtattcgatcactttaggaatttgagtgagatcggtttcatttaaagtaacggtatcgccacctttatatactgtttcttcatgcagcatccaccatgcaaccggggtcattgcttttggattcagatcaataaattcctggcaggtcatatctttagcggattcattggctgccaacgcagattgtgcgttcaccagactcaaagccgctacagcgcccataaaaataaacgctttacggagagaactaatattcattttgtaacccattcaatatagagattatatatgaacaggaggaatagctgcttttaaagaagatattccggcctgttcaatatgcaaggaagtacgatgtaacgcattcccggaattacatatctttcttaattttgtcccattcgcctttaactttatctttaaagttggcttgtttatcctgagtacaagcctgaacgatagctggggttacggttgcaataccctgaacatctaaaaccgcatcttctggtttatctttgttgttcagcgcttcagcaaaaccaactgcagttggctggaaggattcgtccacagccaggaaatcttcacaggtccaggagttgaccggttttttgttatcagctgctttttgcgcatccgctgcattgctcacaactggcagaagaagcagaccaccaagaataacgcctaatacttttttcatcgtaatatcctcaactataaagtgaaagagccgtcacgaatcaatttcgacactgaggttataacctggttttctgtatatgtcatgttgatggaaaatatcaaaatcagatatttttatttcaatacaatgagttacagatgcatcagatactgcaattaggaaatttttattaaatcgactgcattcttagacgcgtttttggcatagattgatagcaggggattttcttcttaattttatagggtggttctatgttatatatagataaggcaacaattttgaagtttgatctggagatgcttaaaaaacatcgcagagcaatccagtttattgccgtgctgctgtttatcgtcgggttgctgtgtatcagtttcccgttcgtctctggcgatattttaagcacagtagtgggtgcattattaatctgcagcggtattgcgcttattgtcgggttattcagcaaccgcagtcataatttctggccggtattatccggtttcctcgtcgcagtcgcctatttattgatcggctatttcttcatccgcgcaccggagctgggcatttttgccattgcggcatttattgccggtttgttctgtgttgcaggggttattcgcctgatgagttggtatcgtcagcgtagtatgaaaggcagctggctacagctcgttattggtgtgctggatatcgtcattgcctggatattccttggtgcaacgccgatggtgtctgtaacgctggtttccacactggtgggaattgaactgatatttagcgccgccagcctgttcagcttcgccagtttgttcgttaagcagcaataattaccccggttgtcacccggatcatagtcacttgatgtgactatgatccgattaatactctctccgctacgcagtgttgtagatcaattgcgcactatcattgaaataattacctgctagtgattatttcaacctactgaatttcatctaatttttttcactctatggcaaattagccatttcaaacattatcatggctgatattttccgtagtcaggtttaatgttttaaaagtgctgtgggaaagtgaacaaagagttccgtaagcgttgatgctatgggcggttaaataagtaatccgggttcatttttttgcaactggcgttgattacattgcataaatatccgtgtctccagacgctatataaaaacctgaagacatgaatgcgttatttactcaggtaatttcaatgcgttaaaagaaagctggcaatccaattgccagcttaagtcgaaacaaggagactcgatatttaaatcggattacattttaactttagtaatattcttcagagatcacaaactggttattgataacttattcttgggcagtaatccgcaaacgttaactttttgtttgctatttacaagctgataacaaccaggaatcttacttaggatcaatatatggagtgcgtgatggataaatctgaagtattgattagtgttaatagacgtattagttcacgaagggtaaagttcttataggcgtttactatattgaacaacgattcggacaaggatgtaaataatgaaaaggatgacatattcgaaacgataacggctaaggagcaagttatgatttttctcatgacgaaagattcttttcttttacagggcttttggcagttgaaagataatcacgaaatgataaaaatcaattccctgagtgagatcaaaaaagtaggcaataaacccttcaaggttatcattgatacctatcacaatcatatccttgatgaagaagcgattaaatttctggagaaattagatgccgagagaattattgttttggcaccttatcacatcagtaaactaaaagctaaagcgcctatttattttgttagccgcaaagaaagtatcaaaaatcttcttgagattacttatggtaaacacttgccccataagaatagtcaattatgttttagtcataatcagttcaaaattatgcaactgattctgaaaaataaaaatgaaagcaatatcacgagcacgctcaatattagccaacaaacattaaagattcagaaattcaacattatgtacaagctgaaactaagacgtatgagcgacatcgtcaccctgggtatcacatcttatttttaatcaggacataagcaactgaaattgatggctggcatgacgagggatgcagatgctgatttcattacccccggtgattactaaaggagaggctaaaacgactttattcccctggtatgtgtatccaccagtagaacccttcgttgcccgaatgctggcaggaactgttggcagaacggcaacattttttttgtcgttgacctcaccatgtcgatcactgtgcctgtatcccaccttactggctgacaaccccactatgccgctggtctgtaaatccctcatatctctcctcgcgcgcaatttaaagaaccgttatttctcaagaattttcagggactaaaatgaacagaagaagaaagctgttaataccgttgttattctgcggcgcgatgctcaccgcctgcgatgacaaaagcgcggaaaacgccgccgccatgacgcctgaggtcggtgtcgtcacactctcccccggtagcgtcaatgtgttgagcgaattgcccggtagaaccgttccttatgaagttgccgagatacgtccccaggtgggcggtattatcattaaacgcaactttatcgaaggcgataaagtgaaccagggcgatagcctgtatcagattgatcctgcacctttacaggccgagctaaactccgccaaaggcagcctggcgaaagcgctctctaccgccagcaatgcccgcatcacctttaaccgccaggcaagcttgctgaagaccaactacgttagccgtcaggattacgacaccgcgcgcacccagttgaatgaagcagaagccaatgtcaccgtcgccaaagcggctgttgaacaggcgacgatcaatctgcaatacgcgaatgtcaccagcccgattacgggcgtcagcgggaaaagcagcgtgaccgtcggcgcactcgttaccgctaatcaggcagatagcctggttaccgtacaacgtctggacccgatttatgtcgatctcacgcagagcgtgcaagatttcttacgcatgaaagaagaggtcgccagtgggcaaatcaaacaggttcagggcagtacgccagtacagctcaatctggaaaatggtaaacgctacagccagaccggcacgctgaaattctccgacccgacagtggatgaaaccacgggctccgtgacgttacgggcgattttccccaacccaaatggtgacttgctgcctggcatgtacgtcacggcattagtggatgaaggtagccgccagaatgtattactggtgccgcaggaaggcgtcacccacaacgcccagggtaaagcaacggcgctcattctggataaagacgatgtcgtgcagctacgcgaaattgaagccagcaaagccatcggcgaccagtgggtcgtcacctctggcttgcaggctggcgatcgggtgatcgtttccggtttgcaacgcattcgtccgggtatcaaagcacgagcaatttcctccagccaggaaaacgccagcaccgaaagcaaacaataacgttgcaggcttaaggggactttcatggctaactattttattgatcgcccggtttttgcctgggtacttgccattattatgatgcttgcaggtggtctggcgatcatgaacttaccggttgcgcagtatccgcagattgcgccaccgaccattaccgtcagcgctacctatccaggtgccgatgcgcaaacggtagaagacagcgtcactcaggtgattgagcaaaatatgaatgggcttgatggcctgatgtacatgtctagtaccagtgatgcggcgggcaatgcctctatcactctgaccttcgagactgggacatctcctgatatcgcacaggttcaagtgcaaaataaactgcaactcgctatgcctagtttacctgaagcagtgcagcagcaggggattagcgtcgataagagcagcagtaatatcctgatggtagcggcgtttatttctgataacggcagcctcaaccagtacgatatcgcggactatgtagcgtctaatatcaaagacccgctaagccgtaccgcgggcgttggtagcgtacaactctttggttccgagtatgccatgcgtatctggctggacccgcaaaaactcaataaatataacctggtaccttccgatgttatttcccagattaaggtgcaaaacaaccagatttccggtggtcaactgggtggcatgccacaggcggcagaccagcagctaaacgccagcatcattgtgcagacgcgtctgcaaacgccggaagaatttggcaaaatcctgttgaaagttcagcaagatggtagccaagtgctgctgcgtgatgtcgctcgcgtcgaacttggggcggaagattattccaccgtggcacgctataacggcaaacctgctgccgggatcgccatcaaactggctgccggagcaaacgccctggataccagccgggcagtcaaagaggaactgaaccgcttaagtgcctatttcccggcaagtctgaagacggtttatccttacgacaccacgccgtttatcgaaatttctattcaggaagttttcaaaacactggttgaggctatcatcctagtcttcctggtcatgtatctgtttttgcagaatttccgtgccacaatcatcccgacgattgccgtaccggtggttattctcgggacgtttgcgatcttgagcgcggtcggtttcaccatcaacacgttgactatgttcgggatggtgctggcgatagggttactggtggatgacgccatcgtggtggtggagaacgtcgagcgtgtcattgcggaagataagctaccgccgaaggaagcgacgcataaaagcatggggcagatccaacgtgcgctggtcggtattgccgttgttctttccgcagtgtttatgccgatggcctttatgagcggtgcaaccggggagatctaccgccagttctccatcacgctgatctcctccatgctgcttagtgtatttgtggcaatgagcctgacccctgccctgtgcgccaccattctgaaagccgcgccggaaggcggtcacaaacctaacgccctgttcgcacgcttcaacacgctgtttgaaaaaagtactcaacactataccgatagcacccgcagcctgttgcgttgtaccggtcgctacatggtggtctacctgctgatttgcgccgggatggcggtgctgttcctgcgcacgccgacctctttcttaccagaagaggatcagggggtatttatgaccaccgcgcagttaccttccggtgccaccatggttaacaccacgaaagtgctgcaacaggtgacggattattatctgactaaagagaaagataatgtccagagcgtgtttaccgttggcggctttggcttcagcggtcaggggcaaaacaacggcctggcgtttatcagtctcaagccgtggtctgaacgtgtcggtgaggaaaacagcgttaccgcgatcattcagcgggcaatgattgcgttaagcagtatcaataaagccgtcgtcttcccgttcaacttacccgcggtggctgaactgggtaccgcgagtggttttgatatggaactgctggacaacggtaacctggggcacgaaaaactaacccaggcgcgaaacgagctgttaagtctggcagcgcaaagtccgaatcaggtcaccggggtacgcccgaacggcctggaagatacgccgatgttcaaagtgaacgtcaacgctgcgaaagctgaagcgatgggcgtggcgctgtctgatatcaaccagacaatttccaccgccttcggcagcagctacgtgaacgacttcctcaaccaggggcgggtgaaaaaagtgtatgtccaggcaggcacgccgttccgtatgttgccggataacatcaaccaatggtatgtacgcaacgcctctggcacgatggcaccgctttctgcctacagctctaccgaatggacctatggtagtccgcgactggaacgctacaacggcatcccgagtatggagattttaggtgaagcggcggccgggaaaagtaccggtgacgccatgaaatttatggcagacctggtcgctaaacttccggcaggcgtcggctacagttggaccggactaagctatcaggaagcgttatccagtaatcaggctcctgcgctgtatgcgattagtctggtcgtggtgttcctcgccctcgccgcactctatgagagctggagtattccgttcagcgtgatgttggttgttccgttaggcgtcgttggcgcattactggccaccgatctgcgcggcttaagtaatgacgtctacttccaggttggtttgctgaccaccatcgggctttccgccaaaaacgccatcctgattgtcgaatttgccgttgagatgatgcagaaagaagggaaaacgccgatagaggcaatcatcgaagcggcgcggatgcgtttacgcccaatcctgatgacctctctggcctttattctcggcgtgctgccgctggttatcagtcatggtgccggttctggcgcgcaaaacgcggtaggtaccggcgtgatgggcgggatgtttgccgcaacagtgctggcaatttacttcgttccggtctttttcgttgtagtggaacatctctttgcccgctttaaaaaagcgtaacgtgtaaatgagagtaaggttgaacatgaaggttcagccttactctttcctgctaaccattcaccactcaacaaccagctaaccgtcaggaataccaggcttagtacacagcactgaaagtagaaaccactccagccattcgtcatcaatttgaacaacacaatactgacccacattcccgtaatcgtatgaattgtcagcttaataatcccaaacatgccgagtcttttcctcctgaaaataccgataccgcctggcaaactgcgaaagagaactagccggtagcccggcagaaatcatcagggaagagtttcacatgaagcaggtgtgagatcctgaccaatattcaaatgcgaaatatgtcaggaaaaggtacctgggctatgttgcgcaaactgatgtggcgttacaccataatattgtcgaaatgtgtttataaagtagcttgtactgctatagccacatttttccgcaatagtatgcagaggaatttgacgtaactcgagtaatcgtctggccatgctcatcctggaggcgagtaatattttactgaaacaggtattttcatcctgcaacttttttttgattagactctcgctggtatacattctttccgcgatatcgcgcagataccaacgtttggcgatatcaaagctaataaggcgttcaacttttccactaacagtgctgatgctattgaaaagtaaggggatcagttctttcttatgagaaaacatgcttaaacaggaaaggtagagcatattgctcagtatcggactatttaccccggattcattgaagctatcaaaaatcgccgtcaccagcggcatggggggactctggttaattaacaaacggtctttgctgtgtaaccctaaattgcgtggtagctgacgaatattttgtaagtaatggcaaactgtcagctcatcgatatccagtcgtcgcgtatccggactacaaaacgcaaaatcgtctgccaaatttttctccagcagcagaatactctcgttatgcaggcttattttttgctgttcatgataaatatcgaaactacgacgaatgaggatcacgctgcagacatgagtcatgattatcccttatatttcatactgcgattatttcaatttcagtatactaatgaaatgatgccagactgtttcttagcgcaaaaactgccagatttggtaggaccaaaatttatccacaaagtagttttgcataacagttaattgataataagtaaatgcagcacgaatatattttcgcacagcgtatagcttatgtttataaaaaaatggctgatcttatttccagtaaaagttatatttaacttactgagagcacaaagtttcccgtgccaacagggagtgttataacggtttattagtctggagacggcagactatcctcttcccggtcccctatgccgggttttttttatgtctgagtaaaactttataatcttattccttccgcagaacggtcagtgccgtaaaaattcccttgcgcaacaatacttgccgcgctgtcacggttgctcaatctctgcgcgcttcgctcctgatactctgtgggcgtcatcccataataatttcgaaagacgtaaatgaaatagctcacgctgtgatatccacaggatactgcaactcgcttaatactaaaaccatgtataacaataagttgcaaagcacgttgcattctacactcagtaagcaactgactataacttgtctcttcttcgcgcaattttttctttaacagacttggactcatcaacagctcgctggcgattcgggctagtgtccactcatgggcgatattattattgataaccgtacaaactcgtgttcgcatgttcggttgtaaaacgttcagaagcagcggtataaagtgctcatcctcaagaaaaacagataacaacgcaaagattaatgctcttttacgtagcatttctgcatagcgaagattcttattctggcttagttgcgcaacttcctgaaaaacaggaatatctctactacagtgatgaacgagtaaactagaaacttttttatgtgcatgaagatttaatgcctcctccttgagcatcgggagaaataaactaagcgtgtccctactcacgaatacaaaattttcaacacacttatctactcgaatttggcttgcatccgcaaaaaccaggtcaccgccattaaaatagcgatattcaccattaaccatggtgagaatatatttatgtcttgcatacgcaattagacaattcccatgtagactttgcatagttgacttaatattacataaacatattactgtttattaatgtagcacgccgccctcttaagtcaaattgattgataaataaatttaaacgaagcgggagaacaggatgataatgtgtgatgttctacgggcaggatgactggatttataatacaaaaacgtgtttaagaacacagggaaattaatagtaagcaaataatcccttttcgtgacattaaaggtaatcgctacatttaataaacattcatataacatatatcttatcaacacgatgaatagacagccaatatattattgcgattaataagcaaccgaatgcccagctgtttttttaaaggctgggcattcggtttttacaacgttatgttatcaggtgtgtttaaagctgttctgctgggcaataccctgcagtttcgggtgatcgctgagatatttcagggaggctttgtagtcttccagcaacagttcagcaaagtccatttcgaagccgcgacgacacataatgcgcatcaccacgatgtcggtggcttcaccgccgagagtgaaggccggaacctgccagccgcgcagacgcagacgttcagagaggtcgtacagggtgtatcccggatcttcaccatctttcagtttgaagcaaaccgccgggatgccttcgtccgggcgacccgtacagatgaactcatacggccccagtttggcgatttcatccgccagataagcggcaacctggtaagaggcgttctgtactttggtatagccttcacgaccgaggcgcaggaattcatagtactgtgcaattacctgacccgccgggcgggagaagttgatggcaaaagtaccaatttgaccacccaggtagtcaacgttgaacaccagttcctgcggcagcgcttcttcgtcacgccagataacccagccgcagcccagcggagccagaccgaatttatggccactagcactgatgcttttcacacgcggcaggcggaagtcccagacgatatccggggcgacgaacggtgccaggaagccaccgctggcagcgtcgatgtgcatgtcgatgtcgataccggtgtcggcctggaatttatccagcgcatcgtgcagcggttgtgggaactcatagttaccggtgtaggtcacgccgaaagtcggcaccacgccgatggtgttttcgtcacaggcttcaatcatgcgtttcgggtccataaacaactgaccggggcgcatagggatctcacgcagctccacatcccagtagcgggcgaatttatgccagcagatttgtaccggaccgcacaccaggtttggtttatccgttggtttgcctgcagcttccatacgcttgcgccaacgccatttcatcgccatcccgccgagcatacaggcctcggaagaaccaatggtgttggtgccaacggcctgaccatttttcggcgcaggcgcatgccacagatcggcaaccatatttacgcaacgcaggtcgatggctgcggattgcggatattcttctttgtcgatccagtttttattgatgctcaaatccatcaatttatggacgttttcgtcgtcccaggtctggcagaaagtggccaggttctgacgagcgttgccatcaagatataattcatcattgataatctgaaatgcgacatcatcgcgcatttcgtgcagcggaaatcgtttactctccgcgatagtagaaatggcctttgcgccaaaacgactatcgagtagttcactgcggaaatccgttaacagcttctggtccatttcgaactccttaaatttatttgaaggcaataaaaaagtaggatttatccgcaatggaagcaaggcattacaggcttaatttaaataacaaaatcctaagcagaaaaacgactttttataatataaacatttaacatgataatattaaaaacagactttattatcgtaataaaaatcgcccaaacattgctgttcgggcgatcaaattaattattgtttatcctgcatatacggcgtgtacaccccgttcagactgtgcaggaaagctacgatatcatccacatcctcctgcggcagctctttgcctacctgatagcgcagcatcagtttcaccgccccgtccagcgtcggcacgtcaccgcgatggaagtacggtgccgttaaagcaacgttacgtaaaccgggtactttctgacgcaatttatcacgctcttctttagtcacattcatacgaccaatatccgccgccgtaatttccccaaagttaaagtcttttttcagccccaacggttcaaaggaacgtccgccgagaataataccaccatgacaagttgcacatttattatctttaaataattgatagccttttttctgttgcgccgtcagcgcattttcatctccgcgcaaccatttatcaaatggggaatccggcgtaattaatgttttctcaaattcagcaatggcatcagtaatattttcgccactgaaaccttgcggatagacttcgaggaactgcgttttaagctgcggatctttttccagcttagcaataatttcgtcccaggatttgctcgccatttcaatcgggttcaacggcggtccaccagcctgatcctgcaatgttgccgcacgaccatcccagaactgctcaacgttaaatacactgttaaataccgtcggcgcgttaatcggcccaactgcgccaccaacaccaatgcttgtttttctgccatcgacgccccccgcattcaacgcatggcaatgagcgcaactaatggtgctatcagcgcttaaacggggatcgtgatacagcgcaaaacccaacgccactttttgcgcatcggtaggcagtttttgcgggatgggctgcaccggttcattgcgatgttccggagcagtatcattgctggcgtaatattccgcgcgctgttttgcaatccaggccagtatttccgcccgctcttcatcactcaccttacccgcccagtgtagcgcggtataacgcgttggtggcatagtttcatactgcatcacccattcaatcttattcaaatcgctttggctaacgggtttatcagccagcagtgccgcacgcacggcctcaaggttaaaagatttatatccaagcttaatgtcgtaatccatcaactgtttcgcgccaggaatataataataggcgggtaattctgcgctaggcgtgtggcaatagtcgcatcctttttcgcggagaaagcctaaaaccttattattttcactgacagcagatgcctgaacatcggcctgtttactgcgtttattatcgtggtaccacacataaccagataaccctaaatagcaaatcgcgacgccagccaggccgatcgcggtaatacgactgaccattttcattattcttccctcacggtggtgagttattgtgacccagaaaattttccagaatgctgcaaacgtctctgcgagacaaagccatcataaaaaacagggagatacgctttttgataggaatcaatcaattacatgaatataaactatcaataagatagcctgtgcctattacccagatcaggaatggcatatcatgattgcggcgagagcaggattgaatgttctgaaaatgaaaaacaacaccaaatcggtatttttataaattccattgatattagtgcgttatattttttgacaggttaataaacgtgatccaccgcacgctttgtcgcccaccaggcggagcgaatgactacccttaaagaaaagccgataattagcgacgaatttcggaggttggatccttatgctcaatcagaaaattcaaaaccctaatccagacgaactgatgatcgaagtcgatctctgctatgagctggacccgtatgaattaaaactggatgagatgatcgaggcagaaccggaacccgagatgattgaagggctgcctgcctctgatgcgctgacgcctgccgatcgctatctcgaactgttcgagcatgttcagagcgcgaaaattttccccgacagtaaaacctttcccgactgcgcacctaaaatggacccgctggatatcttaatccgctaccgtaaagtgcgccgtcatcgtgattttgacttgcgcaagtttgttgaaaaccacttctggctgccggaggtctactccagcgagtatgtaagcgacccgcaaaattccctgaaagagcatatcgaccagctgtggccggtgctaacccgcgaaccacaggatcacattccgtggtcttctctgctggcgctgccgcagagttatattgtcccgggcggccgttttagcgaaacctactattgggattcctatttcaccatgctggggctggcggaaagtggtcgggaagatttgctgaaatgcatggccgataacttcgcctggatgatcgaaaactacggtcacatccccaacggcaaccgcacctattatttgagccgcagccaaccaccggtttttgcgctgatggtggagttgtttgaagaagatggtgtacgcggtgcgcgccgctatctcgaccaccttaaaatggaatatgccttctggatggacggtgcagaaagcttaatccctaatcaggcctatcgccatgttgtgcggatgccggacggaagcctgctcaaccgttactgggacgatcgcgacacgccgcgtgacgaatcctggcttgaggacgttgaaaccgcgaaacattctggtcgcccgcccaacgaggtgtaccgcgatttacgcgcgggggcggcctccggttgggattactcttcccgttggctgcgtgatactggtcgtctggcgagcattcgtaccacccagttcatccccatcgatctgaatgccttcctgtttaaactggagagcgccatcgccaacatcagcgcgctgaaaggcgagaaagagacagaagcactgttccgccagaaagccagtgcccgtcgcgatgcggtaaaccgttacctctgggatgatgaaaacggcatctaccgcgattacgactggcgacgcgaacaactggcgctgttttccgctgccgccattgtgccactctatgtcggtatggcgaaccatgaacaggccgatcgtctggcaaacgccgtgcgcagtcggttactgacacctggcgggattctggcaagcgagtacgaaaccggtgaacagtgggataaacccaacggctgggcaccgttacaatggatggcgattcagggatttaaaatgtacggcgatgaccttctgggtgatgaaatcgcgcgaagctggctgaagacggtgaatcagttctatctggaacagcacaaactgatcgaaaaataccatattgccgatggtgttccccgcgaaggcggcggtggcgagtatccgttgcaggatgggtttggctggactaacggtgtggtacgccgtttaattggtttgtacggcgaaccataatatttttacagccagccgctaacttcctgctggctgtaaaattatcctcttcaggaggagatatttaacatcattgccgcctgggtgcgatttttcacttccagacggcgatacagggattccagatgcgcttttaccgttccggtactgatattcagcgctctgccgatctccttattactttcgcccgccgctaacatggttaaaatctcccgctggcgggcgcttaagcttttgagatctttaatgtccttttccggcgtcgtccgccagtctccaggcagaaacatcatccccatcgccgcactatttaccgccaacgcaaatgtctcgacggtactatcacgaggcacaatggccagcacattaaaatggataacttcctgtaaccaccgtttattgcaatccgtcgccgtaattaacaccttaacctcaggaaattgcaccacggttttttgcagcaaccagtagcaaaactcaccatcctgatcgccatcgagcataactaaggcttcagggtaactttccagcttttgccataactcgtctgcctgactggccccctgaatactcactcctggaatacgctgctgtaaactgattttcattccatgaataaatatactctgcctgtcaaacatgactatttgcataactgaatctccacctgaatacgttaaaaagacttaagtagtggaagggtattacccgcgagaaaaaataagaattcgccatttggcggtggccattctacagagatgacgtgtagaaaatagttaccgatataaatagttacagctaaacgcctgaaattacatgtcgagggcactatttaaaacaattttgaggatttccttatattggtggttagtacgcatgcaattaaaaatgaaattccgcgaccacaagccaaaataacaaacggcaaggagacaaaaataagcacaaatagccaacacgtcctctgttcactttaaagggaatcgctgaaaaatacgctctgtttaaggggattcacctttctcagaaagctattccgcccttttcctgctgagaaatcgccacattcggcatgacaacattgtgaaacccggcattagatgttagaaaaaacaataaacaatgcgatatgcgcgttactgtttcgctgtgaacaacaaagcgtcaaagaaatggataaaattcacgcaatgcagttgttcatcaaagtcgcggagctggaaagtttttcccgcgcagcggatttctttgctttgccaaagggaagtgttagccgccagatacaggcactggaacatcaacttggcacccagcttctccagcgcaccacgcgacgggtcaaactcacgccagaaggcatgacctattatcaacgagcaaaagatgtgttgagtaatctcagcgaactggacggtctgtttcaacaggatgccaccagtatcagcggtaaattacgcatcgacatcccgccaggaatcgcgaaaagcctgttactgccgcgcctgagcgaatttctctatctgcatccgggaattgagctggaactgagtagccatgaccgtccggtagatattcttcatgatggttttgattgcgtgatacgcactggcgcgttaccggaagatggcgttatcgcccgtcccctcggcaaactgaccatggtcaactgtgccagtccgcactatctgacgcgctttggttatccgcaaagccccgatgatctgactagtcacgcaatagtgcgttatacaccgcacctgggtgtacatccgttaggttttgaggttgccagcgttaatggcgtccagtggtttaagtctggcggcatgttgacggtaaacagtagcgaaaactatctcaccgccggtcttgccggtctggggattattcagatcccgcgcattgccgtgcgcgaagccctgcgtgccgggcggcttattgaagtattacctggctaccgtgccgagccgctctcccttagcctggtttatccgcagcgtcgggagctttcccggcgtgtaaacctgtttatgcagtggctggctggcgtaatgaaagagtacctggactgaccgactatactttttaagaatgaccacgacagaaggacaaaagagcggatgacgcaggaaaacgagatcaaacgtcccatccaggatctggagcacgagccgattaagccgttggataatagcgagaaaggcagcaaagttagccaggcgctggaaaccgtcaccaccactgccgaaaaagtccaacgccaaccggttattgcgcacctgattcgcgcgacagaacgctttaacgatcggctgggtaaccagtttggtgcggctatcacctatttcagttttttgagcatgataccaattttgatggtgagctttgccgcagggggctttgtgctggcctcccatccgatgttgctacaggatatcttcgacaaaattctgcaaaacatcagcgatccgacgctagccgccacgttgaaaaacaccatcaacaccgccgttcagcagcgtacgactgtagggcttgtcggcctggcggtggcactttattccggcatcaactggatgggtaacctgcgtgaagcgattcgtgcccagagccgcgatgtctgggaacgcagcccgcaagatcaggagaagttctgggtaaaatatctgcgagattttattagcctgattggtttgttgattgcgctgattgtgacgcttagcatcaccagcgttgccggtagcgcgcagcaaatgattattagcgccctgcacctgaacagcattgagtggctgaaaccgacgtggcgattgattggcctggcgatttccatcttcgccaactatctgcttttcttctggatcttctggcggttgccgcgccaccgtccgcgcaaaaaagccctgattcgcggaacatttctggctgctattggttttgaagtgattaaaatcgtgatgacctacaccctgccaagcttgatgaaatccccctctggcgcagcatttggttccgtgctggggctgatggcatttttctacttcttcgcccgtttgacgctgttttgcgcggcgtggattgccaccgccgaatataaagacgacccgcgaatgccggggaaaacgcagccttaaaataggccggatgcggcgtaaacgccttatccggcatacgattttattcggcctggctccccgtaggccggataagatgcgccagcatcgcatccggctataatgcgcacataacctcttgaaactcgtccccagagcctcttcagccatctatttgggagcaaacaatttcattccaactcataaccccagcatataaatccagttggtaacttttatttaacctgaaaccagttttatccactatttataaaattatgtgaagcatttcatagaagaaaaatcactggcctaaacattatcccctttttgcctgatttttgaccatttccgcgatttgttacacattgaaatatcacttttgctgtgcgtaatatggctattcgttagccaaaaaataagaaaagattatgcaagcaacagccacaacactcgaccacgagcaagaatacacgccgatcaacagccgtaataaagtccttgtcgcctctctcattggcacagccattgagttcttcgacttttacatttacgccactgcggccgttattgtgtttccgcatatcttcttcccgcagggcgatcctacggcagcaacgctacagagcctcgccaccttcgccatcgccttcgtcgcgcgccccattggctctgccgtttttggtcattttggcgatcgcgttgggcgtaaagcgacgctggtcgccagcttgctaacgatggggattagcaccgtggtgattggtctgctgccgggctatgccacgattggtattttcgccccgctgctgctggcgctggctcgatttggtcagggtctgggcttaggcggtgaatggggcggcgcggcgctgctggcgactgaaaacgccccaccgcgcaaacgtgcactgtatggctcctttccgcagctgggcgcaccgattggcttcttctttgccaatggcactttcttgctgctttcctggctactgaccgacgagcagtttatgagctggggctggcgtgtgccatttatcttcagcgcggtgctggtcattatcggcctgtatgttcgcgtgagcctgcatgagagcccggtgtttgagaaagtcgctaaagcgaaaaaacaggtgaagatcccgctgggtacgctgctgaccaaacatgttcgcgtaaccgtactgggtacgttcattatgctggcaacctatacgctgttttacatcatgacggtctactctatgacctttagtaccgccgccgcgccagttgggcttggcctgccgcgtaacgaagtgttgtggatgttgatgatggcagttattggttttggcgtgatggtgccagtcgctggattactggctgatgcctttggtcgccgtaaaagcatggtaatcatcaccacgctgatcatcctgttcgcgctgttcgcctttaacccactgctcggttctggcaacccgattctggtttttgccttcctgctgctggggttaagtctgatgggtctgaccttcgggccaatgggtgcgctgttaccagagctgtttccgacagaagtgcgttacaccggagcaagcttctcttacaacgtagcgagcattctcggggcttccgttgcgccatatatcgcagcctggttgcagactaactacgggctaggtgcggtggggttatatctggcggcgatggctggcttgacgttaatcgccctgctgctgacccatgagacgcgacatcagagcttgtaataagagtgaaaagcctgatgcgctacgcttatcaggcctgaatttccatacaatatattgaattcgcaaggatttgtaggccggataaggcgttcacgccgcatccggcatgaacaaagcacactttgccaacaatctaaatctgtttaattgccggatgtcagacatccggcaattatcatcacttcttcatctggctcaaaatcgtccgacactgattagcctccccttcggaaggactgatcagtgccagtaacgccgccgccggtgttaccagcgttgccagtgccgcagcaacagcaccacgggcaatcagcggtccggctttcaccccagcctgcggatttttaaacgtcccccgcacatacagcgggctacgcagtgtgataatccgaattcctttactctccggatcaatagtcaaatccagctgttcgctagcaaaacttgccgtgccggtaacattaatcaacgcgttctcagtatcgaaagcaaaaatctgcgggcgcgccacgccgttggcaatattcagattcgccgccgcgcagttcacccgcacctcatcatcaccaaatatcgcaccgacaatgtagttgccgacattcagcccaacaatctccatcaggttgcggctcaccagcccgtcattcatcaacagtttcaggttgccgttactgttgcctaaaagtgccgccacgctgttaccgctaccgcgtagttccgcgtcaccgttcatttcccccagcgtcttctgcatcagttccacatcgggcatcagttctttcagtttcagtcgacgagcctgaatatctgcccgcccctgcatcggctttttatcgccttccagatgaatattcgccgcaatgctgccgcccgccatgccaaatttcagcggttgcaggcgcaggtcagcatttttgaggatgatatgagtagaaagatcgctaatcggcaggctactgccatgctcaatgcgccgccctttgaagcgaacatcggcatccataacgtcccatttatcggtttcgaagcggtcataaggcagcactttgcccgcaggctgaacgcttttttcgcccttcttctgttcagaccgtttgctcttttctgcccctttcccggaatcaacgccaatcaacggtcccaggtccgccagccgcaattgccggctctcgacatcaccttccagttttggtcgtggctttccggtggtgtagaccagagaaccgtggatatcgctatcaccaattcgcccattaaaaccgcgataatcaaagacgctgcttttttcagtgtcgattttcgctaccagccgaccatccgtttcaaacggcggggtatcgggcagcagaacgcccgtcagttcatagagatcacccagactatcgccagaaaatttaagccgtaaatcgacaccgcccatcttcattgggtcattcacgacgccatcaaaagcaacacgggtgttaccagagcggaaatcagcctgtaccggaaacggcgtcccttcgccacgcagcgccagcataccgcctatttttcccgtacccgtgagcggttcaccgttatatcgtccctgcgccttcaggccaaaaacgtaatcgcccaccttttctttatccgctttacctttgcttccagtaacttcgctgaacggcagcggcttgcctaagggatcaacaaaaatctccagatccgctttgcttactttgtcatcaatggcgatccgcccttgatcgaaaagaatattatccagccgaaagctccatgcgctcggctttgcattcgcgtctttgttatcatcgttggcaagattaaacgtccagttattgttcttttcagagaggcgaatcaggcgcgcgtcgggcttttcgagcttgatccacggcagccagaccgttttggtcagcagcgccagcggggccagcgttgcctctacgcgtggcaaatgcaccatcgtgacttcgggaatatccggtggattgccaagaatgatgtcttccgcgtgtacatggggccacggcacccagctgcgccagccagtttcttgtttttgccgctcccacaccacgcccagatcgccacggatagcgaacggacgattcaactccgcagagactttctggttgatagtcggtttgagtcgattccagtcaaaagttgcaatcaaaatgatcgccacgacaatcaacaacaagaaagccccactaatcgcagcggttattttgcctgccttgctcatcgttcgcttcctcatattcttcctgtgccagtcctaaagatagtccagccaggcggaaaatgaggcagcttatagcgccagaaccgccgtattcagcgtttctatcggtgccgggcgactaagaaaccagccttgtgcggcgaatgcggggctgttctgaacatcacgccactcttccggcgtttctacgccctcgacaatcaccccgcgacaatagcgattcattagatgtaaaagctgagaaaagagtgtgcgtccttccgggctctgacgcagcatcacaaacagttctcgcgcgattttgatgtagtcataacgcacttcacttagcgcagagaaatttgccatcccggtaccaaaatcatccagccacagcgggccaaattcacacatgctggcaaaggtactatctttcggcagacggatatgctccaccagttcgaaacgcagccagggaagacgctcaatctggcgcaggatttttggttgctgacgcagggcgatgagcgtagggccatcaatattgacgcttgccagcaggccgtgctctataaagaagtcggctttttgcgccagcaaatcaatctgctctttcacaacctccatccgatggctgacggtgatttcagtaaaatagcgatccggcggcaggcgttggctagggttcaagggatgcgtgaccaccgttaatagctccacggccattaaccgcccgcatgtttgatagatcggctgccaggtgtaagcacgctcacactgcaaccaaaaacgccgttcctgcaagctctcgatgcttgcttcagggttgcttattcgctggataacctgccttatcatcaaagatgtcctgtgtttaaaagtgatgctgcccggactcgacaaagattatcggcgcgtaagggcagaactttaccgcctggccggggtaaatttcctcactccacaacggaatctttcaggaatacgttctggctcaaaaaaataatggaacactgttttaatatggttgaccagcaaaccaccacagcgcaaactaacgctaattttttacagatcaggttcacgactatgtccaaaaagattgccgtgattggcgaatgcatgattgagctttccgagaaaggcgcggacgttaagcgcggtttcggcggcgataccctgaacacttccgtctatatcgcccgtcaggtcgatcctgcggcattaaccgttcattacgtaacggcgctgggaacggacagttttagccagcagatgctggacgcctggcacggcgagaacgttgatacttccctgacccaacggatggaaaaccgtctgccgggcctttactacattgaaaccgacagcaccggcgagcgtacgttctactactggcggaacgaagccgccgccaaattctggctggagagtgagcagtctgcggcgatttgcgaagagctggcgaatttcgattatctctacctgagcgggattagcctggcgatcttaagcccgaccagccgcgaaaagctgctttccctgctgcgcgaatgccgcgccaacggcggaaaagtgattttcgacaataactatcgtccgcgcctgtgggccagcaaagaagagacacagcaggtgtaccaacaaatgctggaatgcacggatatcgccttcctgacgctggacgacgaagacgcgctgtggggtcaacagccggtggaagacgtcattgcgcgcacccataacgcgggcgtgaaagaagtggtggtgaaacgcggggcggattcttgcctggtgtccattgctggcgaagggttagtggatgttccggcggtgaaactgccgaaagaaaaagtgatcgataccaccgcagctggcgactctttcagtgccggttatctggcggtacgtctgacaggcggcagcgcggaagccgcggcgaaacgtgggcacctgaccgcaagtaccgttattcagtatcgcggcgcgattatcccgcgtgaggcgatgccagcgtaaacgcagcatatgcaaaaggctggataaagtgttacccctctatccagctcatccataaatacctgatggttgtgctaactcatcaccatcaggcattactgtgcaggtggaatatccgtcacttcaggatgtacgtcatccgtggcgacagaggtggtcgcagcggcggtagatggggccatgatttgatcccagaccgcctgcaacgctttcatgttaaattccggctcgcctttcggctgcagcagtattaacgccatatcattgctcaactgttgacgcagatcctgatttaacatctctaccgtcaggctattaaggaaatcctgccgcagtttctgatattgctccggcgcgatatcgacaacctgattttgcaagctacgcatccgctgacccatcagaatatcggtatcagctcgtgcataggcggcaaacagtttctgcagctccagtttcttttgcgccactaacgcattgaactcttcttccggcagacctttatcgcgaaccttcgccagttcacgcgccaccagattaaggttgctgttcagcttgtcgtttggactttcgatgttgatggcacactgcgcacgcagatacagcacacggcagtcaaatccaagaccgatgtctttgctgttactggcacttaacgcttgctgaacatgccagaacagcgcctcgcgggccaggtccgcacgccagtagcgcagcagtgcggcactttcacgaatcggctgccacggcgtatcccacatgatagataaccggtcctgacgcaccgcgtcagtcataatactcaccgcttccgcacgcagcggagaaagcgtcggcaccggagctggcgtttcacgtttgcctttcagttcgccaaacgttttgtttatttggtcgacaacgctgcgcgcatccacgtttcccaccaccagtagcgtcattgcatccggggtgtaccatttctgatagaaatctttaattttttccgcttcaacgggttgtttcagcggatcggcaggatcgtgacctaacaaggtactccctttcagacgatagcgccaccagccctctttagtatcggcaggccaggttgccaccatgtcctgactttgcagcgcgtggttgatggtttctggtgtgatggtcaatttgccagtggcatttgccagataagagagcgcttctttcagcaaatcgttacggttattgggcaaactcagattaaacagcgtggtgtcataagagacaattaccggcggcatcgggcgtttagggtcgatcccctgctgccacaaactacgcgcctgtgctgcgtcaaggccaccgctttgcgttagcgcaatacgagggatggcgtgactgtaaccgctctgttgtgtactttcggcgaggctaccggtattaaccagcaggcgaatttcaacacgatcgctgggacgctggggggtggtcagcacttgccactgtaaaccgttggaaagcgtcccctgttgccatgctggatcaggctggagcgcatctgcctgcacatagccagcagtggccatcatcagcaaaccgcccgctaaaagtcgaatttttgtgccctgcatgtgaacccctgatcaactatcctggtaataaaaaaactgcccgttgtcggtcagtctaaatgacgttaaaaacacttcgtgttagaccgcaagaacatgaaaatgtcacggaagaagtgaaataaacctgaactcacccaggtggtaagttcaggcacaggggtcaattatgcgcaaacacccgcactcggggaagggagtgcgggcataagtgatgagattaagaggataattcgtgcgttttgccatccggcgcacgattattcagcacatcgtccagttttttgtggtccagttctttcacccacttagcaacgacaatggtcgctacgccgttaccgaccaggttagtcagcgcacgagcttcactcataaagcggtcgataccgaggatcagcgccagacccgctaccggcaaatggcccaccgcagagagcgtcgccgccagcacgataaagccactacccgttacccctgccgcccctttagaagaaagcagcaacacgattaacagcgtgatttggtggacgatatccatctgactgttagtggcctgggcgataaacaccgccgccattgtcaggtatatgcttgtgccatcaaggttaaagctgtagcctgtcgggatgaccagccccaccacgcttttacggcagccgagtttctccatcttgtcgagcatacgcggcagcgcgctctcggaagaactagtccccagtacaatcagcagttcttcacggatgtagcggataaatttgaagatactgaaaccagtcgctttagcgatactacccaataccagcaccacaaacaggatacaggtaatgtagaaacagataatcagctgccccagttgcaccagtgtgccgacgccgtatttaccgatggtaaacgccattgccccgaacgcaccaataggtgccagacgcatgatcatattgatgatgccgaagatgacctggctgaaactttcgatgacgttaaaaatcagttggcctttgctgcccagacggtggagcgcaaaaccaaacagtacggcaaacagcagcacctgcagaatgttaccgctggcaaatgcgccaatgacgctcgccgggatgacatccataatgaaggcgacaatgccctggtctttcgcctgatcggcgtaaaccgctaccgctttcgcatcaagcgttgccggatcgacgttcattccggcaccaggctgcacgacgttaacgatgataagaccaataatcagcgcgatggtactgacaatttcaaagtaaagcagtgcgactgcgccggtacgaccgaccgccttcatgctttccatgcccgcaatgcccgttacgacggtacaaaagatgacaggagcgatgatcatcttaatgagcttaacgaagccgtcgccaagcggtttcatttgctcgcctatttcaggatagaaatggccaaggagaataccaatggctatcgctgtcaggacctgaaagtaaaggcttttaaacagagaggttttcatagggtgtcctttagtaaaaccacaggtcttgtaaggttatggggtacctgcggccttaaaataacacccagacaacatcacagaaatgtacctggatcataattgaaacaaaaaggttaaaaagtttgagctggctcgcacaaaccagcactttttaaagttttgtaatcagtttggggtagttacttttcttccaggtaactctcttcgaagatttcaatagggagtgggcgagcaaaaaggaagccctgggcaataccaacgcccgcttttgccagccagtcgcgttgtgcttcagtctccacgccttcggcaatcatttgtaagttcaggctctgcgccagcatgataattgcagcaatcatgctgctatctcccggcaagccttcaacaaacattttgtcgattttcagtacgtcgattggcaagcttttcatatgctgcagctgacgcagccctgcgtagcccatgccgaaatcatccagcgccacccgaactccggcattgcgcagcggacggaggattgccaccgcagcatgagggtcgtcaatacgtcggctttctgtcacttccagaatcagtgttcccggctgaatgcgatagcgggttaacagttccagcatatccgccaccatattcgggtgcatcagttgcagcgcagagaggtttacgctcaagggcagcataatgccgcgctcttgccaggctgcaagcaatcgacaggactcttccagcacccagtgaccgacggtaaccatcagcccacagcactcaatgcgatcgattaagccatccggcaggtcccaactgccatccggttgctggatacgcagtaacacttccgcactgaccagtttaccgctggtcatctcgacctgtggctgtaaccaaatagcaaactgatgattttccagtgcattaaggatatcgctctcttccgtcaaccgcttctgggcggcttccatctgctgcggatcaaagaactgaatctgattcttgcctttatggcgagcggtaaatgccgcagaaatagcgcgactgtaaagctgttcggcggtgagatcgccgtagaacatcgccacgccaatgctacagtgcggacggagttgaatacgttcaatcggcaggcgctcgctcatgatagtgagcacttgctgacctaaggtgattgcgtgccacggttcctgtacaccgttggcaatgacagcaaagtcataaccgctaatctgcgcgaggatcatacgtgggctcagtacgcttttgagtttttccaccagcgtcagcagcagaatttctcgttgcgcctctttcagcacgcccgcagtatcacgcagggtttcacaggtgatgatcatcagcgcggtggtttgtttacgcgcgacaacctgctccagcatctccatcagcaaggctttgttcggcaaatcgctcaccgggaagcgcatcgcattttcgttctgttcttcataatggcgctgcagcaattgctggttgaggttgtaactgcgcaccaacataccgatttcatcgtcctgatgcagacgcggtaatgccagttggtgaccaacaagctccttggctgggatggcgttaagttcgcgagcaatattgcgtaacggatgcaaaatcaggcggttaatgcaccagctgatggcgacggtcaggataaggctcaaaagtaagtaaatggtcactaacgtactgagggtgctcatcacgaacttatacatacggaaggaatccgcctgtagtaccagataggcaattggctgcgggtttgccggacgttcgaggctgtaaacgcccaggctgatttgaaccggtagctcaaacaggcgagtaaccattaccggcaccgggcgctctggaataaaacttttacgcagcgcctggaactggttaggcagcactacatcggcacggctgaccacgcctgccggtttaatgctggcaagaatagcttccgcttcgggaatatcgcctttcaaaatagcactagataagggttcgcggacagagcgagcaatgctttccagttgcgtagccgtgttatagcgattctgctggaccagatggaacagcaaaacggtgcaaaaaataaaaacgaacaccaggacaacggctgccaccattgccatctgcttgattgttaacgagcgacttacgcgcaaattgtctccccccggaaatcccagattgccgcccgagtatacccgatcgcagcggcattaagagaggcgctatctgaaaacttaccagtcggcgtaaggtatcagcggctgcggcggtaaatccatgtcaccctgccatccggcggcggaataacgtacgtagagcaggaaatggctgggtgcgtaatctttcgcctgctggatatcaattgccgtgccaacaaaccagttggaagtaacacgtcgttcaagtaatgcccgcgccgtgtagccgaagccctgactgctgccgccatcgttggattgccgcgcagcttcttcctgccagtcggtcgggatcagattcatcagcggataacgcggcatggttttggtgcgactatggctccagctgccagacgcacccagctcccagctccagttttccgtgcgctcccgccacatcaccggtatggcaaagctcaggtattcctgcggactgtagtaaccgccctgaccgagactgtagccactcagatctttgtcgtaatgccagatcatgttgttcaggccgattgtgacgcggcgattgttctggttaatgaccttatagtaatagcccgtcatccagcgcacgcgccagttatcttcgacatttttaccggttaactggtcgccactaaggcttgcccagacgccgtttgcttcacctttatcgtagctcagacttagccccacaccgtcggcacgtacgccaccccattttttcccggtattgctcggggagtctttttgcccaccaaaggccagcaaagaactggagatgggccgacggtgggcgttaacggtgtaacccagcggcccgatatcatcgctgtaactgatgccgccgaccacatccaccacgttgaagcccatcggcgtggtaccgatatcccagctccagacgtcatttcgccagccgaccgccacgctggcaccggaatcgctctggctgcggttgccgctacagtcctgtaatgtacaggtgccccagttgtcatcccatttgccatcggcattagtggagaaactgccgacgttcatattgacgaaatcactgcgaaagaacatccgcccgtcagaatacggcgcatccacctgcaacatggtagtgtgcgctttcagatcggagtaaccaccggtgccgctgctaccccagtaatcgtgctcaagggtgacgttaagatcctgctggcgatagaggtccgccgcatcgctgcgcacgccacgtttcagccagtcatctttctcgtcgttacgggtcagtcgggtaaaggtgtcgttatcctgcggacgcgtcgtagtcacaccggatgcgaccatggcgtctttgtaggtttccagcgcctgcgttggatcgcccgcctgcgcttcaaacttcgcaccatcacgcagcaccatcgcgctttccatgctcggtggctgagattttgcctgcgggatcaacttattaaacgtccgctgcgctgctgcggtatcgccaagctgcgcctgtgccagcgccacgcgccgctgtgtgttcaggctggcgttatcggtagcgggcagtttcgccagctggctacgtgccgccgctttgtcaccggcagcaatatccacttccgtcagaccaagaatggcgtcggcgttagctggctcccgcgtcaggacattctgatatgcagcgcgggcggcggtgtaatcacgtcgttgttgcgcccagtcagccagcgtgaggtcaatacgcgtggaaggtggttgctggcgcagcatcgcttccgcttctgcctctttgccgctttctcgcaggcggttagcggtttccagcacctgatcgctttgcagtcgattaaccagctcctgaatattgctgttccactgcgcacgcggcaggctattgatatgcgccagcgccgctctgtcctggtcatgaccagagaggtacagcccgtaagcgtaaacctgctccgggtcgttgctcttctgctgcgccagattgcgcattaacgtatcggcctggctgcgttgtccggcctgccagagatcctggctaagtcggtaagtaatccatacgctgccggggtccagcgccagtcgttgccgctgaagtgctgccgcctgcgcccatttgccctggttttccagtgcctctgcctgctgtgccagacggtcgttttgcaggctgcgttcgatatcatcaatgctacgccgctgactggcagagaggctggcgataaacgcttcagctttttctgggctttgctggcggtaaatatttgccagcccgcgcacggcgttagtgttgccgctgtccatacgcaaggtctgctgataataacgttcggcggcgggataatcttttcgcgccatcgccacatcgcccagccccagcactgcataactgtcggtgttatcgacattacgcgcctgctggaacaggcgttctgcccggtcaggattattggctttcagcgcagcatcgccctgctggatcgccagccagtagcggtttactttcagcagactgttccatttgtcgttgttgctgctgtgcgggtccagtgcgagggctttttccagattcgccactgcattggcgcgatcgcctttctgagaatacgcctggcccagcgcccccagagcttcactgtctttcgggttcgcccgcaccgcctgttgtagttcgggaatggctttacccgccataccagagtccaccgccgctaaaccttgcgcacgagcgcggaaagcaggatcggccagctgtttttgctgttctgccagttggctttgcgcagccgccacgctatcgccatcactaaagatgctgagatattttttcagcgcgctcacactggcatcactgacgggcatgtctttaatctgcccgtaccagattttagaggccccttcgcgcccggcgttgctttttgccatctgttccaggacggcaaaaccttcgtcacggcgatcgctactaaacagcaatagcgccagattgttttgcaggcccgtattgcccggtgcatccgcattgatgcgttttaactgattaatcgcttcgccacggcgagccggaattttcgccaccgtactccagtactcgacagcaatgtcaccttccggcggcgcaccgttgaacagtttgttgtaactcgccacagcttcttctgcatgaccggtcgtcgcctgcaatcgtgcctgttgcagtgcctgacgaccatccggcgtggaaagtagcatcgtagtccggctgcttttatacgcattactactcggcgctaactggctcagccgatcgagctgtttttgcgcgccatcaatatcgccctgacgtaacaaagaacggaaacgggcggcaacgacgtccgggttattcggatcaataagttccagccgatataagctctgttgcaccagatcttcacgatgggtcgcttcgcctaaccgaacttgctccagcaactgttgctgagcggttggtgctgcctcgaccatcggcatgacggccagaccgagggaaagcgtgaatatgtttagtgtgaatttgcgcattcctggccccagtcaggtaattactttagtgactatttgcgcattcctggccccagtcaggtaataactcaccttttgtgctgaagcggaaacggtgttgatcccagccttgtccaaacagggtcagcacatagttgtaataggcatcgctgccgggaaagttatcggccacgcgctggcgctgaacggcctgcgcatcgcggttttgtaaaaagggcagcatggcggcagaaaaaccgactggtcctttaccctgcgctttccccgtagccacatccactttttccggcggataaccgtttttctcagtgaatgtcgccatcggtttaaaccggttgagcatccgcgctttttgcggatcgctgtcaggcatcatgcctacccacatgtaaacgcggatagcgtcgtagctgctgatcaatgttttttcggcttttagctgccagcctttgtctttctcatagcgcacccagtctgggctaaaacctttcggggcggtttccagcaataaacgttgattggtttcgcgcagcgtggtccacggcgcgccaaagcgggtgaaatactgcgccagcgtcggcggcaggtagctggggttaaaacgccagctgttatcctcagcaaaacccactttgcccggtaacaacatggaacccagcccaggcaccgtcaccacttcctcccgcgcgatacgttttagcaacgcgctgccgatgtcggtataacgctgctctttccacaaacgccccgcctccagcaagctccaggccatccagacatcaccatcggaggcgctattgctgtccagcacttcccacttactgttctctttcttgccccacagccaggcgggcaaacgttcttttaaagaaccctgagcgagattgttctgcgtccagtcgagaatattatcgaaagctgcacggtcgttagccgccagggcagagaacatgccgtaactttgcccttcggaggtggtgattttgcgcgcgtcgctggggtcgatgacgcgcccttcctgactgatgtaatcctttttaaactgctcccaggcaggccaggtacaggctgcctgaacactaaaggcagccagcagcagcatcgtcacgattccactacgcaacacattcatcttcaattactcgttatccgggttaagacgacgacgactaataattcgcagcagacgccacagtacccatgccagcaatatcacactgatagccgccagcaccgccagcagaatcggatggtttgccagcgcataccacacgcgctcgaaccacggcagatgacctacgtaataaacgtcgccaacacgtaggctgttgataccggactcgcggatcaccgcgacgctaccgaacatggtggcgcgtttgccgctatcgttcaccgcatcgttaagcatttcataaccgcgtgggctatctgccaacagcgcaatcacgctgcgctggtcgttatacgggctctggaagccaatcaccgccgccatcgcaccggaagaggtcagcgtactccgggtttctgccgcgcgatcgctctcgtccggcacaatgccggggaacggggtctggcgcatcggtgttttcacccagctttcggtcgcctgcaccaataggtcgatctgcttatcgtctttcagtttgtccgggataccaccgatgatcatgatgtcggcatctttgccctgaatggtgctgccatcatcggtcaccgtcagattaatcgccgggaagcccgtctgtgcgccgataaaaccaacagtattcagcaacgtttccatctgtgcttcgttaggcgctttcggcatcacggtgatggtttggctcagatccgccatccggctgaatgggaagcccgcgttagcaaaggcgcgtagatccggcatcgggatgaagtggtaatacttgctgaagtcgatggtggagtcgtcaccaatcaccacatgattctgcaccggctggaaggtaatacagttatccacgctaccgcccggcatcgggttcatatactcaaagtcgaagcgcagctggttggtcgcgcccagtttcagcgccggaatagagacatctgttttgccatccagcaaaccttgtaataccggaatccgcagcagcaggcggttcgcctcctgtttgctgctcaggttgaaggattgcaggaactggttattcaggctgatatccatccggctactgtctttcaccggcggcatggtgtagcggtaattaatatccatatcaatgccggtactgcgcatcaggtagagatccggcggcaggtttaggctaacgttaatcgctgctggctcaagaccgctggattgtaactgttcttcataggttttcagttcgccaaatgtgaccggacgatcggtacgtacccagttcggcgcatcgtacggcttacgcggtagcagcggtttcacttcattcactaccacgctttcaccacggaacagaatgttaccctgagcgatacctttcgctgcctgcaacaggtctttgtcgtcacgaccaaacaccaccagcagtttgacgtaaggattctgcggatggttaatcatctcaatcaccggggcttttaccgccggatgatcgcgcaggaagtccggccgtttgtcgttggttgcaaagacaatggcattgcgatccggcagttggttatagagtaccgggaagttctgcccacgccagccagaacggctaccaaaccagctggcgacaatggcagaggcttgttgcagcccaacatccggcgcacccgcaaagaccatcggcaaggtgttggtgcggttatcgctcgggtcaaagaatggcaccgggaagtgactcaggtcattcttcacattcagggtctgataggtcagatccagtccactgctccgcccaacatccagccaaagcgtggtgctggccggtttttcgcacacgtcctgataatggccgacaaactccagccgtacacggttgaagtcgctaataaacagtgggttaatgggcatttgcgccagcgtttttttacccaactgttctttggtcactggcagcacgcccatcagttcatcattgagataaacctttaactggctctggacaggcagtaagcttgggcttggggtgtattcgaagttgagcatcgccttcgtcaccacttcatcgctgcgcataccaaactcaatgctgccgttcgggttaatgccacgtagcaccatgctgcccggcggcggtgcaatttgcgcaaaggtcagcttcacatcacggctaggaccgttctgcgccacgactggcgcatcagcgccctgcacgcccggcatcacttgccccacctgcggattttgttccgtctgggcggctacagctggctcagcattgatcagtggttgcgttgctggcgtcgcctgcgtcatgaaagaggggaacgcactcatccccatagccactgcacaaatccagaatagttttcttttcatcgcgttatcatcattgttgagccaaagcctgatcgcttggttgtgccgtttcgctccgctccgggcggcgcggaataaagcttacaacccaggaaaccagagaagtcagcacacggaatatgcccttcacgctagaaggcgcaaactccgccagatggcggtagccacggaagccgagcttcagaatatccagcagactttccagcggcttatcttccgggtagctgtcctgccagagcgcccatgtatccgcacgggcaaacgtacactgcacaaaatcgatatgttgctgggtggtgagcggcattaatttcagcccaacttcattacccatcacgcgcgccacctgggtcgggaagacgtattcctgctgaccgcgtttaagcaacagattcactttctgcccttccagaatctgcgcctgaccgttgatcttgatccccaaaccaccgtcggagaaatcctgaacggtacagctgaagaggtgaccatcttcgcgggcaattgccgcgggcatcgtcatctccacgcggtggcttcggcgtacctgtttgctttctacgcttaccgcaactgcgccgccaagaacaatcaggttgtagaacacccacaccatactgacgaccacggtgagcatctcggttggcgggccatagaagtagcgccagatgcctaccgcaacgcccaccaggttgagcaggacaaggaagatgtagggccggctgatcacccagtcgacgtactcttcttccaccagtccacctttggcggtgacgttaaatttgcctttgtgcgggttaatcagcgccaccagcgtcggtggtgcgatataccacgccagcaccgtttcgtagatttcactccagaaagagtggcgatatttgccctggatcttggagttggtcaggctggcatggatcatatgcggcagcacgaatagggcgatcatcaacgctggcgcatagatgatgtaggcatgaagcagcaggaacgccagcggcgcagtcaggaagatcagccgtggaatgccgctcaagaagtggaacatggcgttgacgtaacatagccgctgagcaaacttcagccctttaccggtgagcgggttatcgagacggaagatttgtaccatcccgcgcgcccagcgaatacgctgaccgatatgcgcgctcagactttcggtcgccagccccgccgcctgcggaatacgcatatacgcggaggtatagccacgacggtgcaaccgcagagaagtatgcgcatcttcagtcacggtttcgacagcaatgccgccaatttcatccagcggcttacgacgaatcaccgcacaggaaccgcagaagaaagtggcgtcccacatatcgttgccatcctgcaccagaccatagaacagcgtgccttcgttcggcgttttacggaaacgccccaggttgcgttcaaacgggtccggactgaagaagtggtgcggcgtctgcatcatcgccagctgtttttctttcaggaaccagcccatggtcatttgcaagaagcttcgcgttggtacgtggtcgcagtcgaaaatgctcacgaactcgcctttggcatatttcagcgcattgttgatgttgcctgctttcgcatgttcatgagtggtgcgggcgatatatttcacccccacgttttgcgcaaactggcgaaactcttccctgccgccgtcatcaaggatccagatattcagcttatctttcggccagtcgatacccaggctggcgtaaatggtatttttcaccacgttgagatcttcgttgtaagtcgggacaaagatatccacgctcggccacaggctcatatctttcggcaatggcaccggctgacgattcagcggccatactacctggaagtagccgagcaccagcacaatccacgcgtacgtttcagcgaagagcagaataagcccgcacaccaggctgaccggatcgtcccagttcagcgtagaggtgtaacgccaccagatataacggcaagaaacggtcaggctcagcacaatcaacattagcgcgctgaagcgccccggcatccgccgtacgatcagcgctaccccccacagcagcatcaggaagataaactgcgccagcgggttaaacggctgagtaacgcagattaacgccagaatcaggctgaaggtgacgatgataccgaggatcaaccgccgcgccccggcactcaaatgaccgagctcttttttctcatccagatgctgtgttttatggctaacgcgctcaggcagctcgttcatccattgatggtaacgtccacgaatattttgcagaccactaaatgcccgcctgcgcggtttcggcgtttctttgcggcttgcaccgatcaataaccagcatgtttgaatgagataacggaccgggtccagcggacgcggacggctggcgttgatatgcggatacaggtttttatgttctgcgcgaatacgctgccagcgcgggtgctccagcggaataaaaatccaggccaggatcatccagaaacagccgagcgtcgcgctgaaagcgctcgcaccgtgacgacgataatcgcgataacgcccgataagccgcgcgttgaccggcgggataagcaaccaccgggtcaggatactcatgatgcactcccgactggcgtttacatcaacttgcactcccgactggcgttttcagcccggagtagttcaacaggcaccagttcgccagcgtcagtatctcttcagccgccagcgcatcactgcgatattcacctactggttgcttagccgccaggcattcagccatcgcttcatcacgatgaatgagcatcggcagtaatcggcgctggctttgcaaccaaagctggtaaatatcgtcctgaacctgactgccaatacggaagtcattaatcaaaatatgtgcgccatccggcagcgcttgctgatgcagtcggatatggcagttggcatccacattgacgattgccaggctgtgatcgcacaaactcagcagctggtgggttatctggctggcatcacgcggtaagtcgattaaaatccactggtaacgcccgctggcttttagttgctgtaagccggagcaaatatcgctcagccgggtttgccagtgctgtggattttcttgttcttcaatggataactgaccaaaaggcagcaaatcgagctggctggtgtagcgcaacccagcgtcacgccagtcctggccatccagcatcgctctggcccagccctgacggtgggtaaaatcaacattaaaactcaggcgcaacaagttgtccgggcaggcatcgaccaccaggacattttctcccaacatttgtaaactccaggctaatgcggcggtgatggttgttgtccccacgcctccccgcaccccctgctatcccagtacggccattcaccaatcccttacttttgttgcgcaaactctgccagcaacggccagcgttttaatgccgcggccaactgttcgcgttgggaaatatcggcataatcaatatcaggcagactaaatgcctgctttaacgccacaatatcattctggaagatatagcctatcgcgggatcaggcagagtatctggttcattgttattcattttgcttgatccctatgaaataaccgtaccgttcatgagacaattctaaccgtgagcatttcgccggtttattgtttacggcgagacgggaatttgctcactttttgactttccgttacgcaacagaaaaagttaaaaacgaaaagactaaaatcacacgtcttgtgaccttctaaattgattcacatgctaaatctgataagttttaatttcaatggtaggtttatttcttagctttcgctagtaaactgataatcagacaaaatggtgacatgagggacattgtggaccctgtattctctatcggtatcagtagtttatgggatgagctgcgacatatgccagcaggcggcgtctggtggtttaacgtcgatcgccatgaagatgctatcagtctggcgaatcaaacaattgcatcccaggctgaaaccgcacacgtcgcggtcattagcatggacagcgatccggcgaaaatctttcaattagatgattctcaagggccggaaaaaataaaattatttagtatgctaaatcatgaaaaaggtctatactatttgacccgtgatttgcagtgttctattgatccccataattacctttttattcttgtttgcgcaaataacgcatggcaaaacattcctgccgagcggcttcgcagttggttggataaaatgaataaatggagcaggttaaaccattgtagccttttggtaattaatcccggaaataataacgataaacaatttagtttgttgcttgaggaataccgtagtctttttggtcttgccagtttgcgttttcagggtgaccaacatttgctggatattgccttctggtgcaacgaaaaaggggtcagcgcccgtcagcagcttagcgttcagcaacaaaatggtatctggacattagttcaaagcgaagaggcggagatccaaccacgcagcgacgaaaaacgcattctgagtaatgttgctgtactggaaggtgcgccgccgctaagcgaacactggcaactgttcaacaataacgaagtcctgttcaatgaagcccgtaccgctcaggcggcgacggtggtcttttctttacagcaaaatgcgcaaatcgagccactggcccgcagcattcataccctgcgtcgccagcgcggtagtgcgatgaaaatcctcgtgcgggaaaataccgctagcctgcgcgccaccgatgaacgtttgttattggcctgcggtgcaaatatggttattccgtggaatgcgccactctcccgttgtctgacgatgatcgaaagcgtgcaagggcagaagtttagtcgctatgtgccggaagatatcactaccttgctgagtatgacccagccgctcaaactgcgtggtttccagaagtgggatgtgttctgtaatgccgtcaacaacatgatgaataaccctctattacctgcccacggtaaaggcgttctggttgccctacgtccggtaccgggtatccgcgttgaacaagccctgacgctgtgtcgccctaaccgtaccggcgatatcatgaccattggcggtaatcggctggtgctgtttctcagtttctgtcggattaacgatctggataccgcgttgaatcatattttcccattgcctactggcgacattttcagtaaccgtatggtctggtttgaagatgatcaaatcagtgccgagctggtgcagatgcgcttgcttgccccagaacaatggggcatgccgctgcctttaacgcaaagttctaaaccggtcatcaatgccgagcacgatggtcgccactggcgacgaataccagaacccatgcgactgttagatgatgctgtggagcgcagtagttgatataagatgctgtggagcgctcatcatgatgaccatcagcgatatcattgaaattattgtcgtttgcgcactgatatttttcccgctgggctatctggcgcggcactctttgcgacgcattcgcgacaccttacgtttgttctttgctaaacctcgttatgttaaaccggccgggacgttacgccgcacggaaaaagccagggcaaccaaaaaatgactcaatttacgcaaaataccgccatgccttcttccctctggcaatactggcgcggcctttccggctggaacttctattttctggttaagttcggcctgttgtgggcgggatatcttaacttccatccgctcctcaatttggtgtttgccgcgtttctgctgatgccccttccgcgctacagcctgcatcgcttgcgccactggattgccctgccgatcggctttgctttgttctggcatgacacctggttgcctggcccggaaagcataatgagccagggtagccaggtggcggggttcagtaccgattatttaatcgaccttgtcacacgctttattaactggcagatgattggggccatttttgttttattagtggcctggttattcctgagtcaatggattcgcattaccgtttttgtggttgccatactgctatggctgaacgtacttaccctggcgggaccaagtttctccttgtggccagccggacaaccgacgaccactgtaacaacgacgggtggtaacgcagcggcaaccgttgcggcgacgggtggcgcaccggtagtgggtgatatgcccgcacaaactgcaccgccaacaacggcgaaccttaacgcctggctgaataatttctataacgcggaggcgaaacgtaaaagcaccttcccgtctagcctgcccgctgatgctcagccatttgaactactggtgattaacatctgtagcctttcctggagcgatatagaagccgccgggttgatgagccatccactgtggagccatttcgatattgagttcaagaactttaactccgccacctcctacagtggcccggcggcgatccgtttactgcgcgccagctgcgggcagactagccacactaatctgtatcaaccggcaaataacgactgctatctgtttgataaccttagcaaactgggctttacccagcacctgatgatgggacataacggccagttcggcggttttttgaaagaagttcgcgaaaatggcggcatgcagagcgaattgatggatcaaacaaatctgccggttattttgctgggctttgatggtagcccggtttatgacgataccgctgtgcttaaccgctggctggacgttaccgaaaaagataaaaacagccgtagtgccacgttctacaacacgcttccactgcatgacggcaaccattatccgggggtcagcaaaacagcggattacaaagcgcgggcgcagaaattctttgatgaactggacgccttctttactgaacttgagaaaagcggtcgtaaagtgatggtggtcgtggtgccggaacacggcggcgcgctgaagggcgacagaatgcaggtatctggcctacgtgatatccctagcccgtctatcaccgacgtccccgttggggtgaaattcttcggcatgaaggcaccgcatcagggggcaccgattgtcatcgaacaaccgagcagcttcctggctatctccgatctggtggttcgcgttctcgatggcaagattttcaccgaagacaatgttgactggaaaaaactcaccagtgggttgccacaaacagcaccggtctccgagaacagtaatgcagtagttattcaataccaggataaaccgtacgttcgcctgaacggcggcgactgggtgccttacccgcagtaagaacgaaaaaggccgcagagtttcccccctgcggcctggtccgggcgcaaattgccattacggcagcctgacgcccgcatgacacgttacttccgcttgttcagccagttcacgatcatactggcaagaatgccagcaatgaccggagccgctaaatcatgccagaaggccatgcccagctctgcgaacgtcatatagccgcctgtgttgtaatgacaacgtttcgcggctattcttgagtggtctagagtcaagattagcccccgtggtgttgtcaggtgcatacctgcaacgtgcgggggttttctctctccagcaaccaatgccaccagggataaagcccccgcaacattgcgcctcaccggaacctttccggcttgccgctgattctacgattgctttttactgtcagcacccggcaatcttcctcattgcgcgatgccttccagcttaatttctttatttgcaatagttgcagttcatatccgggctgactccagactggtagtgaaatgcgcaattttgtagaattgcgcctcctcgcgacctccccagtgaatctgttgcctcattttttacatactgcgtattcgacttctccacctgttgcgcaagagaaactgggtttattcatttttgcgaggccgacttctttctggacaggactttatgcagcacaacacactaagcaaacacaatcagaaattgccgtttacacgctacgacttcggctgggttttattatgcataggcatggcgattggtgccggaaccgtgctgatgccagtacaaattggcttgaagggaatttgggtatttattaccgcagcgatcattgcttatcctgccacctgggtagtgcaggacatttatttaaaaaccctttctgaaagcgattcctgtaatgactacaccgatattatcagtcattacctggggaagaactggggaattttcctcggggttatctactttttgatgattatccacgggatttttatctactctctctccgtggttttcgacagcgccagctacctgaaaaccttcggtttaaccgatgccgatcttagtcaatctctactttataaagtcgctattttcgccgtactggtggcgattgcgtctggtggtgaacgattactgtttaagatttccgggccaatggtggtggtcaaagtagggattattgtcgtgttcggttttgcgatgatcccgcactggaatttcgccaatataaccgccttcccgcaagcctccgtctttttccgcgatgtcttgcttaccattccattttgcttcttttctgcagtatttattcaggtacttaacccaatgaatattgcctatcgtaaacgggaagcggataaagtactggcaacccggctcgcgctgcgtacccaccgaattagttatatcacgctcatcgcggtgatcctgttttttgcctttagctttaccttcagtattagccacgaagaagccgtttctgcctttgaacaaaatatcagtgcactggcgctggccgcgcaggtgatccctgggcatatcattcatatcacctctacggtgcttaatatctttgccgtactgaccgcattctttggcatttatctcggtttccacgaggccattaaaggcattattctcaatctgttaagccgaattattgataccaagaaaattaacagtcgcgtgctgactctggcgatctgcgcttttatcgtcattacgttgacgatttgggttagctttcgtgtaagcgtgctggtgttctttcagttgggaagcccgttatatggtattgtgagctgcctcattccgtttttcctgatctataaagtcgcacaactggaaaaacttcgcggatttaaagcctggctgattctgctgtacggcattttgctatgcttgagcccactgttgaagctgattgagtaaaccggagcgcatggccccggttttgtgagttaacgctgcggattttcatcctgatcaacagcaaaacaagctaccagttgaccgccgtagtcttttagctgcggctgcaactgggtgcaggggccgaagcgccgacgacagcgggcgttgaaggcgcaacccggcggtggattcagtgggcttggtagttcaccgctgagcttgatgcgctcgcggcgatcgtccgggttcaggcgcggcgtcgcggaaagtagcgcctgagtgtacggatggcgcgggttattgaagatttggtctttcgttcccttctccacgcagcggcccaggtacatcaccatcacttcatcagcaatgtgctccaccacgctcaggtcgtgggagataaagacataagacagccccaactcctgctgcaaatccatcatcagattcagcacctgcgcgcgcacactaacatccagcgcggaaaccggttcatcggcaatcaccacatccgggtcgagcatcagaccacgggcgatggcgatacgctgacgctgaccgccggagaacatatgcggatagcggtcatagtgctcggttttcaggccgactttcgccatcatgctcagggctttttcccgacgctgttctttgcttaagctggtgttgatcagcagcggctcttcaagaatttgcccgacttttttacgcggattcaggctaccgtaagggttctggaagacgatctggattttctgccgacgcagcttctgcgcctgcggatcgtgcttaagcagatcctgcccctggtaatacagctcgccaccggtgggcatttcaatcatcgtcagcaaccgaccgagggtgcttttaccgcagccagattcgcccactactgccagcgttttgccacgttcaaggttaaagctaacgccatccagcgctttaaccagacgttccggcgcgaacatgcctttcttcaccggataatgttttttcaggtcgatagcctgcaacagcggttgttgcagggtggcctcttgcgtactcatagtgtcggcctcccggcatcatcaagtgggtaatggcatttggactgacgcccgtcagcgagcatattcagcgccggttcttcagcgcgacatctgtcagtggcataggggcagcgcgggttaagcaggcagccgttcgggcggtcgtacttgccgggaacgacacctggcaagctcgccagacgttctttgtcctgagcaaattctggcagcgcacgcagcaatgcctgagtatacgggtgacgcggcgcatggaagatggcgtgcgcatcaccggtttccaccacctggcctgcatacatcacgatgattttatgtgccgcttccgccaccagcgccaggtcatgggtaattaacaccagcgccatgttctctttctgctgtagctccagcagtagttcgatgatttgcgcctgaatggtcacgtccagcgcggtggtcggttcatcggcaatcagcagttttggccgacaggcaatcgccatggcgatcatcacgcgctggctcatgccgccggaaagctgatgcgggtaaacatccagacggcttgccggatcgggaataccgacctgattcagcaggtcaatcgctcgctgacggcgggtacttttgttgccgccctgatgcaccttaatcgcttccataatctggaaacccacggtgtagcacgggttaaggctggtcatcgggtcctggaagatcatcgccacttcggcacccaccaggttgcggcgctctttttcactgatacgctgcaaatcctggccgttaaactccagtttttctgccattacgcggcccggataatcaatcagccccataatcgccagactactgacgctcttaccggagccggactcacccacaatcccgaccacttcgccctgttttacgctgtagctgatgcggtctacggcgcggaacggcgcgctttcgtcgccgaaatgcacgcttaatttatctacatttaataacgccatctcgaacctcttactgcttcagtttgggatcgagcgcgtcacgcagaccgtcacccatcaggttaaatgccagcaccgtcagcaggatcgccagacccgggaaggtcacgacccaccaggcgctttgcgcgaactgcaacacgtcggagagcatggtgccccactcaggcgttggcggctgtgcccccatgccgaggaaaccaagagcagccatatcgagaatggcgttagagaaaccgaggctcgcctgaacaatcagcggcgcaaggcagttcgggaagatgttaataaacatctgacgcatcgccccggcacccgccacgcgagacgcggtgacgtaatcgcggttaacttccaccagcacggcggcgcgggttaagcgcacatagtgcggcaaggcaacgaaggtcagtgccagcgcggcgttaccaatgctcgggccgaaaattgccaccagcaccagcgccagcagcagacttggcagcgccagcatgatatcgaccacgcgcataatgatgttatcgaccaggccgccaaagtaaccggcgatcaggccgagaataacgcccataatcaggcttaacacaactaccagacagccaaccagcaggctcaggcgcgcaccgtacatcaggcggctcagcacatcacggcctacgtcatcggtgcccagcaagtgcgccatgctgccgccttcctgccaggctggcggggcgagcagtgcatcgcggaactgttccgccgggttatagggtgcaatccagttggcaaagatcgcgatgaacagcacgatgacgacgtaaaccagcccgacgaccgcgcctttgttgcgtttaaaatagtgccagaactcctgtaacggggtcatcggcaccggtgcgctaatcactttattttcagtaacctgactcatgatgtccccttacttcttatgacgaatacgcgggttcaccacgccgtacagcagatcgaccagcaagttgacgaggataatcatcgtcgccaccagcaatacgccgccctgcactaccggatagtcgcggcgttgcagtgcgtcaatcaaccagcgtcccagaccgggccagctgaagatggtttcggtcagaatcgcccccgccagcaatgttcccacctgcaggccgataacggtcaccaccggcagcatcgcgttacgcagcgcatggacgataatcacccgcatgcgggttagccctttggcgcgcgcggtgcggatgtaatcctcgcccagcacttccagcatgctggagcgtgtcatacgcacaatgaccgccagcggaatagtacccagcacaatggcaggcaagatcatatgggcgacggcatcgataaagttgccgtcttcaccccagatggcggtgtcgattagcataaaaccggttaacggattggagtcatcgaggaacaccatatcgctcacgcgaccggagacgggcgtcaggttccagtgcacgctaaccagcatgatcagcatcatgccccaccagaagataggcatactataacctgtcagcgccaggccaaccgctgtgtgatcgaaaatggaaccgcgtttaaccgcagccagcacgccgaccggaataccgactgccgtagcaaaaatcatcgcgcagacgccaagttccagcgtggcctggaagcgcggcacgaactcttcccaaaccgggatgcggcttttcatactaatgcctagatcgccatgcataacgccccaaatgtaatggagatactgctgccacatcggtttatctaagccgagttcagccagcagctgcgcgtgacgctctggggagatcccacgttcgcccgccatgatcatcaccggatcgcccgggatcatgtggacaaaggcaaatgtgagaagggtaataccgataaacgtggggatgacgagtcccaaacgtcggagaataaactgcaacataacccggattctctatagtgacccgcagcctggaactgcgtgtctgtattgctcacaaatcaattcccgcccttatcggacagggaatgaagtattgctgccggatggcgctgcacgcagaggcacagcgccaccgggtatacagattgttgacaaagtgcgctttgtttatgccggatgcggcgttaacgccttatccggcctacaaaatcgtgcaaattcaatacattgcagaattttcgtaggcctgataagcggagcgcatcaggcatttttgcctttgccatcagtcttgtatggcttttaattattcgatagagacgttttcgaagtgatgtttgcctaatggatcaaccacatagcctttaacttctttacgtaccggttcaaacacggtggagtgagcgatgatcagtgccggagcctgatcgtgcatcaccacctgcgcttgtttgtacagttcaacgcgtttattgtggtcgtcggtagcacgcgccggttgaatcagatcttcaaacggtttgtagcaccatttactgtagttggagccttgttcagaggcggcgcagctgaacagggtggcgaagaagttatccggatccccgttatcgccagtccagcccatcattaccgtctggtgctcgccatctttcgcacgcttgaggtactcaccccattcgtaggtgacaattttggcctgcacgccgactttcgcccagtctgcctgaatcatctccgccatgcggcgagcgttcgggttatacggacgttgtaccggcatcgcccacaggtcgatggagaaacctttttccagacccgcttctttcagcaaggctttcgctttttcaggatcgtaggtgtagtcctgaacgtcgtcgttatagccccacatggttggcgggatcaggtttttcgcacttacgcccgcgccctgataaaccgctttgatgatcgcgtctttgttcaccgcgtaggtcagagcctggcgaactttcacgtcatcgagtggttttttctgcacgttatagctgagataaccgacgttcagccccggcatttccatcagattgatggatttatcctgcttcatgcgagcgatatctgccgggttcgggtacggcatcacctggcattcattcttctgcaatttcgcgtaacgcacggaagcgtcaggggtaatagagaaaaccagcgtatcgatctgcggtttggtgccccagtagccatcaaacgctttgtagcggatacgggaatctttttgatactgctgtaactggaacggaccggttccgattgggttgaggtccagtttttccggtgtaccggctttcatcatcgcatcagcatattctttactcagaatagaggcgaagtccattgccaggtcagcgaggaacggcgcttccgggcgagtcagcacaaactgaacggtgttgtcgtccacctttttcacttcactgatcagctctggcaagcccatgccttcgaagtattcgtagctgccgccagaaactttatggtacgggttttgcgcgtttttctgacgatcgaagctgaacaccacatcatcggcgttcagttcacgcgtcggtttgaattctttattgtcgtgccacttcacacctttacgcagatggaaggtataggttttaccgtcttcgctgacttcccacttttcagcgaggcccgggatcacttcggtggtgccgattttaaattcaaccagacggttataaagcgggacggaagaggcgtcataggtggtgccggaggtaaacagctgcgggttaaacccttccggagatccttcactgcaataaaccagagttttagcctgaacacttgctgcgacggtcatagccaccaggctgagaccaagcttcagcatcccactctttttcaaggaaatacgcattattctgctccaattgtgatgtttgttgttttaaccctttgcagtgggttgtcgctgcctgaccttttttgttttttgcccggtcgggtcaacgttatgaggtggggatgccgtactaattaacatcagtgtaacagtgcggatcctccataaaatgcccctcgtgacctacaatctgtcaacagaatgtgaaaacgtcaatacagccaaccgggatttacaccaacggtgagaatccacacacaaagattaaaaaaacttcaaacagctatttgcagcagagaaatttgtgctactccaacatgaccagaacaatcagcttaatatttagcaacatttggtgattaagttttatgcatttaatgaaaaaaatctgaggaaaaggtggatatctgagcgattaataccatgaacgctaaaacgcacagcggaaaatgccagggccagccataagtaacgcaaaaaaagatttaagcaaatataaaaaaagacaatggtttctgtcacaaatccgttaatggatagtgagatatggggcgcaaatttggcagggaaatgtgtgtcgtgtaggtcgaataaggcggtcgcgccgcatccgacaatggccggcacatttgcctgatgcgacgctgacgcgtcttatcaggcctacgtcgagtcgaacctccctgcccccggaggttctcatcctcatgagctgcagatgcaaaaaagcctgctcgttgagcaggcttttcgaatttggtcggtgatagaggattactcgccacttcgtggctcgccctgcgggccgttgctggcgcaacgttctctcgcttcgctcgagtcgaacctccctgcccccggaggttctcatcctcatgagctgcagatgcaaaaaagcctgctcgttgagcaggcttttcgaatttggtcggtgatagaggattcgaacctccgaccccttcgtcccgaacgaagtgcgctaccaggctgcgccaatcaccgaatgcggggcgcatcttactgcgcagatacgccctcgtcaatcccttaatagcaaaatgccttttgatcggcgagaaagtcagcaggccgcttagttagccgctgcctcttttgcctgcgggatgtgacaccagttgttgttttcgttaattccaccatccggactagtatagccaagacaacccatgatggtatcgtacagctctacgtgacggcgtggcactttcatgtcggcttcttttttcagctgcgcaaacgcctgcgcattggccggattttccagatatttatcactcatccagaccatcatcggtacgcggaactgctccggcggtgccagttcacgcggcgtgccgtgcaggtgctcgcgttcattaatactctcaccgtggtcagctgcgtagaacacaatcgctttcttatcgcgaacctgatcaatcacgctggagataaagtgatccacataggtcacgctgttgtcataggagttgatcatctgcgctttggtacagccgctatcaacaccaatacattccggcttccactgcgcgaagctacgcggataacgctgggtgtagttaaaatggctacctttggtatgcagaatgatcagatgcttaccatccgggttgcgccctaggctttgctgcatttcgtctaccagcaacatatcatctaccggcttgccacgattacgtggctccgcaccaatctgctcacgataagcaatgttgtccgccatcgtgttgctgtagaaccacatttcgctctgcatagcgtagaggtcagaactgaatcctaactgcttcagaaccgcgaaaatgttctgttcttttaatgtgcgctgcggattatcttccgcgcccccctgacgtacaaacatgcaacgcagactgagtttggttgcggtatcacaggagtaaccacggaacgccgccagatttttctcctgggccagtttcggcgtggtattacgctcatagccgaaaatacccatatggtcccaacgcgtggtttcaccgatgataaacacgacataagtgtcatcaacgttttgcggtgcctgataagtgaatttcttcgccggattaagcaaactattattatcggaagattcatcgacccgcgcccaggcatacagccccaacgcagaaagccagttacttggcagataagagttcgctacgacaccgccataactcggcaaatcaacgccggtcgccctctccactttcttctgctggatatccagcaaacgaatcggtgcccaaaccataatacccgccagtacgacgaccgccaggctgcgaatacgctgccctggggttcgcagttgtcggagcaaggtgtagcgacagcggttattccagataaggataagaggcaatgcactaacggcgattaaccagagaataaagttcagaccaacaacttctttactcaggtcgatatcggtggtcatgacggaagcgatgatgccataaccaatgaccacattaaggaaggtcatgtaatagctggcacctgcggaaaagagcaccaccaggcttgccagaatacgccagctgcggcggccaaacaggctaagaagacgtagtaaaaagaaggtcaccagtacggtggcggccagttcaacaacagcagaaatgcctttccagacggtaaaatcgtgcgcatagctgccgaagcggcggtaaaaaaccgcgccattcataaaaaggccaatatagattgcaagcaaaaagctcagcttctgctgtgtaatgcttttgatgtatctcatgcaaacaaaccctggacaaacaggtgataacaccctgcttagtggcttttcaggcccggcagggaaaaagtgcggaggtagtcagataagtaaaatctacacgcgcgaataagtagaccacagcaaagggaaaaagtgtggggaaagagtgtgcatgaagcacaaatttacaaaaatgcaagtttgaaaagagactttagcgttacaaaaagcagtaaaaagggccagttaattggcccaaattttacgagtcattgtttatacatttcgttgatgcgtttgatgcacacggaagctgaagcccagtagctcgcggctgagcattaaagggagccatgcgcctcacgcaacattttctgctctggctgacgaatcgtcgtagaaagcgccaaactcagaatcagcagggcgaaaatcacgtagaaggtcacatagaagccgccaaacagactggcgataatgctaccacaaatgctaccgataccgaaaccgagataaatcacaccgtagtttttcgccaggttattgaggccaaagaactcactgaccagactcggaaagacggtaatagtgccgccaaagttaaatgccacgcaggcaatcgctgcaaagaacgtcactgcattcaatggtgcaaacagcagggccgccatacccaccaggcttatcacctgaccaatggtaataacacggatacgggcgattttgtcagacagaatacccagcaccagacgaccactaaggttggcgatggaaataacagtgactgcattggctgcggaaaccacatcaaggtgtgccagactttgggcgatatctttcgctaccccaatcacgtacaggccgctcatgcaggcggtcaggaacattaccgctaacatccagtactgcggtttacgcatgctctctgccagcgtgtaatctttctccaccacaccattgctggttttcacttcctgttttggtgcgtctttcattaacgttgcgccgaaaacaatcatcaacagcgcaatcgctccccaaatcacaaaggttttttccagaccgaccgtttccagcagctgcgtgtcgataaatttgaaacccaggctacccagaccataagaaccgatagcgaacgcggagatcagacctttacgctccgggaaccacttcacacagttagagagcgtcagcagataacccgcgccatctgccagtcccaccagcacaccggcgcttaaccacagcatcatcaggttgtcagaatgcgctgtcaggaagaagcctaatcccagcaaaatgccggaagccatggtgacgcgtttaacgccaaaacgttcctgtaatttgcccgcaacagaagagctaattgccagccccagacttaacaagccgaaagagaaagcgacctggcttaccggcgcatccagcttggcggaaagcgcgccattaaacaggctccaggtataaacgctccccagcgcaaactgggtaatgatagtaccgatgagtgtcagccagcgggtacgctgataattactaggtgtcatggcagtattcctgcagtaataaaaaggaaaaatctctgccgacaaccataacgaagtgcactttatgcctggggaaaaacggcatgaaatgccatcagaacggaatgaaatgccttagttcaggaatgaatgacgcgacaattattcaccaaatttattatttggtaagttagcacccactatcgccacaactattgttatttaatggtttcaattgtgactgttacgttaaaatctggcgctaacccccatcgtatacagatagtcgctattattagtggtattttctgcctgagttagcgcggcataggcggcaatattttgattgagcaacatatcagcgcctacggtgacatccagccagttgccgttctggtttgtcgccgtcatccggctcaggccactttgcgccttccagatattctcgccaaattgctggttatagctgatttgcgcccagggtcggagatcgccaagccgggagtcaacacgccagcctaaggtactcacgctggcatgccataacggatcggtcagcgtggtagtactgtcgccaaactcgttatacatgctggtggttgtgccatcgtaatgtaatgccgcgaccgggccggttgtaacctgttcatataaaggaaaattccagcccatactcatactgctggtcacatccacaggggtttcttccgccagattgacttccagtcccagcgccctttggctactttgaatacgttggctcaaaatatcgttgtaatcaggttgatgatcactatcccaggtgtaacgctctgtggaaagtccgggttgcgtatcaacgatatattcttgttgccaggcgtaagctgtgttgagaaaaaaggcactgattaccacgctcgccagcaggcttagctgccagcgaccaccgcttttttttatgatcattaacacgactccagggaagagccgaattcggcaatattattgtcattgtatgaaggatatcgggcatagtagccctgtattaaatattgactttttcaccgatgcgtcaagaaaagcggctgaaatttttacgatcgggtacatagcgagggaaagtatggaacgttgcggctgggtgagtcaggacccgctttatattgcctaccatgataatgagtggggcgtgcctgaaactgacagtaaaaaactgttcgaaatgatctgccttgaagggcagcaggctggattaagctggatcaccgtcctcaaaaaacgcgaaaactatcgcgcctgctttcatcagttcgatccggtgaaggtcgcagcaatgcaggaagaggatgtcgaaagactggtacaggacgccgggattatccgccatcgagggaaaattcaggcaattattggtaatgcgcgggcgtacctgcaaatggaacagaacggcgaaccgtttgtcgactttgtctggagctttgtaaatcatcagccacaggtgacacaagccacaacgttgagcgaaattcccacatctacgtccgcctccgacgccctatctaaggcactgaaaaaacgtggttttaagtttgtcggcaccacaatctgttactcctttatgcaggcatgtgggctggtgaatgatcatgtggttggctgctgttgctatccgggaaataaaccatgattcgggaagcgcaacgtagtgaactccccgcgatcctcgaactgtggctggaaagtacaacctgggggcatccctttataaaagcgaattactggcgtgactgcattccgctggtgcgggatgcctatcttgccaacgcgcaaaactgggtctgggaagaagacggtaagcttctcggttttgtcagcattatggaaggccgatttctggcagcgatgtttgtcgcaccgaaggccgtcaggcgcggtattggtaaggcgctgatgcagtatgtgcagcagcgccatccccacctgatgctggaggtttatcaaaaaaatcaaccggcgataaatttttaccaggcacagggttttcacattgtcgattgcgcatggcaggatgaaacccaactacccacatggattatgagctggccggtggttcaaacgctgtaattaactgctggccggtggttcaaacgctgtaagtgtcagttccggaccgttgtatttttccagccatgccagcgccgtattacccgcacagccattccccagccggctgctggggagatctttggtcagcacgttcactgcgccgtttttacaaataccgtcagcggttaaatccagatccggccatgccccttcgtgaatgcaaatcacgccaggtttaattccctcgctaatgaccgctccggcaagaatttgcccgcgtgcgttccacaaccgaacagtatcgccatcttgtatgccgcgctcctgggcatcgtcaggatgaatggtgacaggctcacgatttgccaccgcgtacaattcgcgcagagaactgtaattcagctggctgtgcaggcggtgcgccggatgggcagaaagtacctgcaactgttctggttcggcattgccctgccattcgtccggctccagccacattggatgcccagggcaatccgggtaaccgtaatcggcaatacgctgactgaagatttcaatcttgccgctggcggtttttaacggatgcgccagcggatcgcggcaaaaatcagcgaagcgaataaaccgctcgctgtccgggttttccggcatctcaattaactggttggcttgccagaactcagcaaatggcggcaattcaacctgctggcttgccccgcgctgtcgggcaacgttataaaacgtttccagccattgcagctcactttttccttccgtaaaacgtgcataaccgcccttctcccagcgttcacttaactcggcaaaaacatcaaaatcattacgcgcttcatagcgtggcggcaccacttgcttcatcggcaccagatgctgattactgtaatcaccggtcatggtgagatcattacgctcaaaagaggtagtcgcaggcagaacgatatccgcgtgttttgccgccgccgtccagaagcattcagagatcaccaccagctccggtttttgccaggcacggatcaggcgattggtatcctgatgatgagtaaagttggcaccgcccgcccaccagataaaacgaatatccgggaaatgtcggttcataccgttgtgttgatatgcgccaccagggttttccagtgcttcaacaatgcgggcaacagggattttatccaccgcatcgcagccacccggcaagctgccctgcatggaagagagcaccgcagaacgccgcgtggggttaccaccattggcaaaatggtaagaaagaccaaaaccgccgccgggtgtgccgatttgccccaacattgctgccagcgtgacgatcatccagtgtttttgctcaccaaactgttggcgctgcattccccagcctgccatcagcatggtggtattttggtggaaaatagccgccagctcgcggattttcgctgcgccaacaccacaaatctctgctgcccattcggcggttttcgctattccgtcactctcgcccagcaaataagaggcgaagacggcataacctgtggtgcaacgcgccagaaacgcttcgtcgtgccaaccattttccaccagcgtatgggcgatccccagcatcagcgcaacatcggtgcccatgtgcggtgccacccactccattttatcgccaaagaaatcgacggtttcgcttcgcattggatcaatgcagatcagctttttcccgctgtcacgcagtgcagaaaagtaagaaagcccctgctcatcggatgcattccacgcaattttcagcgtattgagtgggttagcactccacagcaccacgacatcgctatgttccagcaccagcggccaactggtctgctgttgataaacttcactaccacccacgacatacggcatgatcgcctgtgccgcgccggtgctataatcccccagatgcccggtataaccgcctgccagcgccatatagcgttgtaataatgtgctggccttatgcagcacgccgttactacgccagccgtaggaaccagcaaaaatgcttgccggaccataagcctcacgaatgcgtttatgttgttggtgaataagatccagcgcctcatcccaactcacgcgaacaaattcatcctgcccacgaatgccttgcgggttttccggactcgcaagaaagccttttcgcaccattggaaatcgtacccgcgtattgctgtgaacctggtcgcgaaccgcgctctgcaaggagttttccattcctgtggctaacgcgccacggctgctaaacacggtttcgccgtcggtttcaaccagcatgggcccccaatgggcggcagtcagaacggaatatcgtgaggatgagttggccaaaccgaagactcctgaaaggttagatgtattgagcagttaaatattacttacaaatttccgagtattcccaggaataatcttcatgttcacgcggcataatctcccgccacggaacccgtggcaaagaataaaaaggttattaaggattaacaatgaagaaacgtgtttatcttattgccgccgtagtgagtggcgctctggcggtatctggctgcacaactaacccttacaccggcgaacgcgaagcaggtaaatctgctatcggcgcaggtctgggctctctcgtgggcgcgggtattggtgcgctctcttctagcaagaaagatcgcggtaaaggcgcgctgattggcgcagcagcaggcgcagctctgggcggcggcgttggttattacatggatgtgcaggaagcgaagctgcgcgacaaaatgcgcggcactggtgttagcgtaacccgcagcggggataacattatcctcaatatgccgaacaatgtgaccttcgacagcagcagcgcgaccctgaaaccggcgggcgctaacaccctgaccggcgtggcaatggtactgaaagagtatccgaaaacggcggttaacgtgattggttataccgacagcacgggtggtcacgacctgaacatgcgtctctcccagcaacgtgcggattccgttgccagcgcgttgatcacccagggcgtggacgccagccgcatccgtactcagggccttggcccggctaacccaatcgccagcaacagcaccgcagaaggtaaggcgcaaaaccgccgtgtagaaattaccttaagcccgctgtaatccctttcatgccaggtgatgcagaaatcacctggcattcttcagttttccttcatcatatttcaggctaaggtgatcgccttatcagtgaatggagagaagcatgaagccgtccgttatcctctacaaagccttacctgatgatttactgcaacgcctgcaagagcatttcaccgttcaccaggtggcaaacctcagcccacaaaccgtcgaacaaaatgcagcaatttttgccgaagctgaaggtttactgggtagtaacgagaatgtaaatgccgcattgctggaaaaaatgccgaaactgcgtgccacaagtacgatctccgtcggctatgacaattttgatgtcgatgcgcttaccgcccgaaaaattctgctgatgcacacgccaaccgtattaacagaaaccgtcgccgatacgctgatggcgctggtgttgtctaccgctcgtcgggttgtggaggtagcagaacgggtaaaagcaggcgaatggaccgcgagcataggcccggactggtacggcactgacgttcaccataaaacactgggcattgtcgggatgggacggatcggcatggcgctggcacaacgtgcgcactttggcttcaacatgcccatcctctataacgcgcgccgccaccataaagaagcagaagaacgcttcaacgcccgctactgcgatttggatactctgttacaagagagtgatttcgtttgcctgatcctgccgttaactgatgagacgcatcatctgtttggcgcagaacaattcgccaaaatgaaatcctccgccattttcattaatgccggatgtggcccggtggttgacgaaaatgcactgatcgcagcattgcagaaaggcgaaattcacgctgccgggctggatgtcttcgaacaagagccactgtccgtagatagcccgttgctcagtatggccaacgtcgtcgcagtaccgcatattggatctgccacccatgagacgcgttatggcatggccgcctgtgccgtggataatttgattgatgcgttacaaggaaaggttgagaagaactgtgtgaatccgcacgtcgcggactaagccgcgactgcgtagagtaaagcccgataatcgctcgggcttttactctttattgggttgcagtaactgctgtagtccaggcctgattaaacgcctgatgctgtgccggtaatggcgcaatcagtttgttatattcacttgcctgctgactagtcgggaactggatgccatttgcgacaaagctcacctgagtaccttgctgagcaatgtagtctccaaccatcaccagttgttgcgtgaaagtttgtgccgccggaatcaacggttgcaatgcatcagctggcgtcgttaccactttggtgaatgcctgatcaaagaccggtttcaaatcatcgctctgttttagcgcagagtgcgcagcatcggcctgcaacttcgcattttgcagttgttgcgccagcacacccaggctaccgttcatttcacgcagcggaccgctttgcgtaacgtaatcctgcggtacgcgaattgcgttaacgctgtctacaaccgggcgcagaccggaatccatcgcctgattcacctgctgagaataaccatacagaatcgcgtaatcagagacaaaaggaccaaactgttttttctgatcggcagtcagggttggtagacgttcaccgctacgcatcactgtattctgcaggaagtcgataaacgctttacgctgatcgccttctttatcaaaacacccactcaggctaactaccattaataacgccgcaagaggcgcaaaccagcgagagcaggactttcctgtcgccattttcttactcctttcacccaaaaaaagcgcacaacgacacacgcgtgtctgacgtgacaaggatagtccaggacaggcttgcaggataccctttctacgtaatcttcctggtaaaatcatggagaaaatgaaacaaggttaatttgttgtttcattgttaaaaaatgatagtgccgttgccttttttgtagccagagatttacgccttcgcagaaggttagattttcgaaatctttacaaaacaggagtggtaagagatatatcggcatttatcagatcgttaggtggctataagtcacgctaaatgacaggctgaatcgaatcatagccagagcatgccctgacttcaccccgctgtgtctgcttttcccgactattcttaatgagcttcgatgcaattcacgatcccgcagtgtgatttgaggagttttcaatggaatataaagatccaatgcatgagctgttgagcagcctggaacagattgtttttaaagatgaaacgcagaaaattaccctgacgcacagaacaacgtcctgtaccgaaattgagcagttacgaaaagggacaggattaaaaatcgatgatttcgcccgggttttgggcgtaagtgtcgccatggtaaaggaatgggaatccagacgcgtgaagcctagtagtgccgaactaaaattgatgcgtttgattcaagccaacccggcattaagtaagcagttgatggaataaacttttatccactttattgctgtttacggtcctgatgacaggaccgttttccaaccgattaatcataaatatgaaaaataattgttgcatcacccgccaatgcgtggcttaatgcacatcaacggtttgacgtacagaccattaaagcagtgtagtaaggcaagtcccttcaagagttatcgttgatacccctcgtagtgcacattcctttaacgcttcaaaatctgtaaagcacgccatatcgccgaaaggcacacttaattattaaaggtaatacactatgtccggtaaaatgactggtatcgtaaaatggttcaacgctgacaaaggcttcggcttcatcactcctgacgatggctctaaagatgtgttcgtacacttctctgctatccagaacgatggttacaaatctctggacgaaggtcagaaagtgtccttcaccatcgaaagcggcgctaaaggcccggcagctggtaacgtaaccagcctgtaatctctgcttaaaagcacagaatctaagatccctgccatttggcggggatttttttatttgttttcaggaaataaataatcgatcgcgtaataaaatctattattatttttgtgaagaataaatttgggtgcaatgagaatgcgcaacgccgtaagtaaggcgggaataatttcccgccgaagactcttactctttcaatttgcaggctaaaaacgccgccagctcataactctcctgtttaatatgcaattcacacagtgaatctcttatcatccaggtgaaaaataaaagcgtgaaacaaatcactattaaagaaagtaatctatatttctgcgcattcccagcctcctgtgttgatttccaacgagtataactttgatttatagtcaggtggggcttttctctgtctgcctttcggtgaatacctgagacaaacagtctcaagcacccgtggctattctagcttaataagtttgtttcttctccttgatataatcctaaaaaaatctcataaaattaatatatgagataatctttattcagcagaagattattaaaggttgctgtattatttagcgataaaaaaagcctgccagatggcaggctatttaataacggcgttattattgcaacaggctaatatccgcaacgcgcaggaacagttcgcgcagtttctccagcatggtcagacggttgatacgcaattctttgtcatcaaccatgaccatcactttatcgaagaaagcatcaaccggttcacgcagctcagccagttcgaccagcgcatcctggtaacgaccttccgtaaagtacggctccagcttgtcacgtagcaccacaacctgcatcgccagtttaatttcttccggctctttcagggtagaggcattcacgcggtcgctcagcacttcgtcagatttcgccagaatgttagatacacgtttgttcgccgccgccagtgcagcagctgcatccagggtacggaaatggcttaccgctttcatacgggcatcgaaatcagccggacgagtcggacgacgcgccagtaccgcctggatggtgtcaacggtataaccttcgtcctgataccaggcgcggaagcgaccgagcataaagtcgataacatcatcaactacgttggcattagtcagcttatcgccatacagacgcaccgcttcttcggtcagcgtttgcagatcaaggttgaggttcttctcaacgataattcgcagcacgccaagcgcggcacgacgcagcgcaaacgggtctttgtcgcctttcggatgctgaccgataccgaagatacccgccagggtatccatcttgtcagcaatcgccagcgcacaagctactgggttggacggcaggtcatcaccagcaaaacgcggctgatactgctcattcagcgccaccgcgacatcttccgcttcgccatcgtgacgcgcatagtgcatccccataacgccctgggtgtcggtgaactcgaagaccatgttggtcatcaggtcgcacttagacagcagacccgcacgggtagcgtggttaacgtcagcgccaatctgttcagcaatccagccagccagcgcctggatgcggtcagttttgtcgcgcagcgtccccaactgttgctggaacaacacggtttgcaggcgcggcaggttatcttcaagacgttttttacggtcggtgttgaagaagaactcggcatccgccagacgcggacgaacgactttctcgttaccggagataatctgctgcggatctttgctttcgatgttggcaacgaagataaagttcggcagcagtttgccgtcgttcgcatacaccgggaagtatttctggtcacctttcatggtgtaaaccagcgcttcagccggcaccgcgaggaatttctcttcgaattttgcggtcagaacgaccggccactccaccaggctagccacttcttccagcaggctttcgcttaagtcagcgttaccgccaatcttacgcgctgcttcttcggcatcggctttaatcttcgccttacgttcttcgtaatcggcgatgactttcccacgctcacgcagaatttccggatactgatcggcgttatcgatggtgaattccggctcgcccataaagcggtggccgcgaatcacgcgatcggactgaatgcccagaatggttgccggaatgactttgtcgcccagcagcagggtcacggtgtgcaccggacgcacgaagtgcacgtcgcttgcgccccaacgcatcagtttcgggatcggcagtttcgccagagaagtcgcaaccatattcggcagcagtgcttcggtgctttcgcccttcacatgggcgcgatacagcagccattcgcctttatcggtagtcagacgctcagcctggtcaacggtaataccgcaaccacgcgcccaaccttctgccgctttgctcggtttgccttcagcgtcgaacgcctgggcaatcgccgggccgcgtttttcgatttcacgatccggttgcgcttccgccaggttagctactttcagcgccagacgacgcggagcagcaaaccattgaacggtgccgtgtgcgaggccagcgttatccagctccgcagtaaagttcgcagcaaaggactcagccaggctgcgcagtgcttttggtggcagctcttcagtgccgatttccaccagaaaagttttctcagacatagccgcctcttacttatctttgttgcacatcgggaagccgagggcttcacgggaagcgtagtatgcttctgccactgctttggtcagggtgcgaatgcgcagaatgtagcgctgacgctcggtgacggagatggctttacgcgcatccagcaggttgaagctgtgggcggctttcagaatacgctcgtaggctggcagcggcagcggattttccagcgccagcagctgctgcgcttctttctcgtactgctcgaagcaggtgaacaggaagtccacatccgcgtattcgaagttgtaagtggactgctccacttcgttctgatggaacacgtcgccgtaggtggttttacccagcgggccgtcgctccagaccaggtcgtaaacgctgtctacgccctgaatgtacatggccagacgttccagaccgtaggtgatctcgccggtaaccggtttacactccagaccaccaacctgctggaagtaagtgaactgcgtcacttccatgccgttcagccacacttcccagcccagtccccaggcacccagcgtcgggttttcccagttatcttccacgaaacggatgtcgtgaatagtcgggtccatgcccagctctttcagagaaccgaggtacagctcctgaatattgtccgggcttggcttaatgaccacctggaactgatagtagtgctgtaaacggttggggttttcgccgtagcgaccatcggtcgggcgacgagaaggctgaacataagcagccgccatcggttctggccccagctcgcgcagacaggtcattgggtgagaggttcccgcgccgacttccatgtccaatggttgaacaatggtgcagccctggcgagcccagtaatcctgtaaggtcaggatcaagccctggaaggtcctggtatcaaacttttgcatattatttcgtgctggatacgtgtggatttaaaggaagggatcagtatacccgctggatggaagatatacagtacgaaacgggaaaaagcagggcttaacgcatggaaagatgcaaaaaatggccatccgcgtcaaaagaacagacaaactgctctttacggaaggtataaccgcgcatttcatagcttccctggaactgttcgaaggcggtgacgtcgattttttgctcgccggtgttataacgttttgccgcctgatccttgcataacgcttccatattcaagctacgcagaggatcaacctttacccgttgtgctttctgcacgggactcggtatagaacaacccactagcaccataagcgccattgccggaaagaaagcgttcatcatcattaaattaccgtctggtttgcaggtgagtcttattatttatatcggtatagtggctgatatcttacgaatttccttaagcctctataagctgtagtgataaaactcagattattccagtgcgccaaccaaatgatttatcggtcagactttttttaaccagatacagagacacagatgcagcccaaaatttactggattgataacctgcgagggatagcgtgtttaatggtggtgatgattcacaccactacctggtatgtgaccaatgctcatagtgttagccccgtcacatgggatatcgccaatgttctgaattctgcctctcgtgtcagcgtgccgctatttttcatgatttccggctatctcttttttggcgaacgcagcgcccagccgcgccatttcttgcgtatcggcttatgtctgattttttatagcgcaatcgcactgctctacattgcgctgtttacctccatcaatatggagttagcgctgaaaaacctgctgcaaaagccagtgttttaccacttgtggtttttcttcgcgattgcggtgatttatctggttagtccgctgattcaggtgaagaacgtcggcggaaaaatgttgctggtgctaatggcggtgattggcattatcgctaacccaaacacagtgccgcagaaaattgacggttttgaatggctgccaattaacttatatatcaatggcgatactttttactacattctgtatggcatgttgggccgcgctatagggatgatggacacacagcataaagcactgagctgggtgagcgccgcgctgtttgcgacgggggtttttattatctctcgcgggacattatatgaattgcagtggcgcggaaattttgccgatacctggtatctttactgtgggccgatggtttttatctgcgcaatcgcgctattgactctggttaaaaacacgctggatacgcgtaccattcgcggacttggcttaatctcccgccatagtttgggtatatacggattccacgccttgattatccatgcgctgcgcacccggggaattgagcttaaaaattggccaatactggatattatttggatcttttgcgcgacgttggcagcgagtttgttactttctatgctggtacaacgaatcgacagaaacagattagtgagttaagtaaaagcccggtcacattggactgaccgggcttacgtgagttattcgctgtattcttcctgggtaacctgtgtttcttttggtgggtttattccggcatcacgaatatttttctgcaccgctactgcaccaaacaagcttaagaagaaagccagtccataaaaacctttttcgctgagtaataatgtcgcattccacagacctaccatcagtaatgcaacagagataataaagacagtcaggcaggtcatataataaatggaagtggtcggtatgccttcatacttgtcccgaacggtcttttgataagacgccgcagaaaacagtcctaataccagtacggcaaaataatatcctttttcatttaactgcatctctgcattccatagccctaacagataggtaacgataccaccaacgagagctatccaactcacaatactaaaggccggactataggtacttattttgttgtccatcacagtattcctttcattcctgaatatgtaagagctttatgttgctcatgcgctgcgaaacaaacgcatttgaccaaacaagcagacaaaaaaggcgatgggatagatcaccatttcataagtattgataggtgcgtttaaaacaccgataaacaagagaccgatagtgattaacgcaactaactggcagatatgggtaaaaaaatcatccagttgcccgagtttttctgcgcgaagatatgcatagttgccaaaagttgctgtcattaacacgccaagaaaatagccttttccacttaacaatgggcaactgatccatagcccaaccagataaaccagcgccccgacaacaaataatagtttcgccacagtcttactggttttcataacgatctccatatctaccagcgatacattacgagtaaccaacgaaagacaaaactgaaaaatgccattaacaaatgattttcagaataaattcatactaaatattaattaattactgagatatatagatgtgaattatcccccacccggtcaggcaggggataacgtttacgccattaatggcagaagttgctgatagaggcgacggaacgtttctcgtcgtggctgataagcggcataacgctgcgcatctggtagatggctctgttctaacggtagttgcggcaacaattcaatgaggcttttctctggattcgccgcgatctgcgccagccttgctgcgcccagtgctggccccacatccccccccgtacggtaatcgagctgctgaccgctgatatccgccagcatctgacgccagtactcactacgcgccccgcccccaatcaacgtaacactttgcggtttaataccgcaggcatgcacgacatccatgccatctgccagcgcataacccacgccttccagcactgctcgcgccagttcattggggccatgttgatgagtcaaaccaaagaaaacccccttcgcctggggattattgtgtggcgtacgctcgccggaaagataaggcagaaaccaaactggctcggcactttcatcagcctgttgagctgcagcgattaaagctgggacattgctcaggccggttaatttcgcggcccaatccagacagctcgctgcactcagcatcacagacattaaatgccaacgttgcggtagcgcatggcaaaagctatgtacggcgctttctggcttgcttaagaacccttcgctgacagcaaaatagaccccgctcgtccccaggcttaacattgcctgattagcatcaaccattcccacaccaactgcaccagctgcattgtcgccaccgcctgcgacaactggcaccgtcgccataccccacgctttcgcaacttcaggtaacaaagcaccagtaatttcgctgccttcgtataatgcgggcatctggtcacgagataagtcgcaagcctgcagcatgacgtcactccagtcacgctttgcgacatccagccacatggtgccagctgcgtcagacatatcgctggcaaactcccccgtcatacgcagacgcaagtaatctttcggtaataatactttgtcgatttgacggaatatctccggctcatgccgctgaacccatagcaatttaggcgcagtaaatccgggcatcatcaggttgccggtaatcacccggctttgcggaactcgcgcttccagcaaagtgcactcttgcgcacagcgcccgtcgttccacaaaatggcagggcgtaacacccgttgctgagcatccagcaaggttgctccgtgcatctggccggcaatacccaatgctttaacgtcctgcagagaatgctgatcgcccagagctttcattgcgcgatcagttgcctgccaccactgttccgggtcttgttcgctccagagtggatgcgggcggctaacggtcagcttttccgtttgcgcagcaaccacctcaccctgctcgttgagcaaaataacttttacgccgctggtgccaagatctatcccgatatacatatcgatcgttccttaaaaaaatgcccggtatcgctaccgataaccgggccaacggactgcacagttagccgttatttgtcgaacagataatggtttaccagattttccagttgttcctggcgaccactctgatgcaccggagacaaatgatgttcctgagcatatttggctaaatctgccagactcatttggcctttcaggatttgctggcccaattcgctattccagccggaataacgctgcgcgatgcgtttatccagctcgccatcttcaatcatgcgcgctgcaattttcagcgccagtgccatcgtatccatcgcgccgatatgaccgtaaaacagatcatatttatcagtactttgacgacgtactttggcatcgaagttcagaccaccggtggtgaaaccgcctgctttgagaatttcatacatcaccagcgcattctcttccacactgttcgggaactggtcggtgtcccagcccagttgcgcatcgccacggttggcgtcgacagaaccgaacaggccaagcgcaatggcggtggctatttcatgatggaaagagtgacctgccagcgtcgcgtggttagcttcaatgttcagtttaatctctttttccagaccaaactgtttcaggaagccatagaccgtcgcggcatcgtaatcatattgatgtttggtcggttcttgcggtttcggttcgataagcaacgtgccctggaaaccgattttatgtttatgctcaaccaccatctgcataaagcggcccagttgttcacgctcctgacgcaagtcggtatttaacagcgtttcgtaaccttcacgaccgccccacaggacatagttttcaccgcccaatttatgggttgcttccatcgctgtaacaacttgcgttgccgcccagctgaagacttcaggatctgggttcgtcgccgcacccgcgccgtagcgagggtttgtaaagcagttggccgttccccacagcagcttcacgccgctctcttcttgcttgcctgccaggacatcaaccatttgcgcaaaattattgatgtactcttttaagctcgcgccctcaggggaaacatccacatcgtggaagcaataaaatggcacatgtaacttgtggaaaaactcaaatgcgacatctgctttacgcttcgccaacgccagtgcctcaccaggctgctgccacggacgattaaacgcccccacaccaaacatatccgccccgttccagcagaaggtgtgccagtagcaggcggcaaaacgcaagtgctcttccatacgcttacccaacaccagttcgtcgggattgtagtgacggaatgctaacgggttactggatttactgccttcataacgaacgcgatcgagctggtcaaaataggcttgcatattgaactccataatcaggtaatgccgcgggtgatggatgatgtcgtaatattgggcactccctttcagttgctcaattatgttatttcacactgctattgagataattcacaagtgtgcgctcgctcgcaaaataaaatggaatgatgaaactgggtaattcctcgaagagaaaaatgcaataagtacaattgcgcaacaaaagtaagatctcggtcataaatcaagaaataaaccaaaaatcgtaatcgaaagataaaaatctgtaattgttttcccctgtttagttgctaaaaattggttacgtttatcgcggtgattgttacttattaaaactgtcctctaactacagaaggccctacaccatgaaaataaagaacattctactcaccctttgcaccagtctcctgcttaccaacgttgctgcacacgccaaagaagtcaaaataggtatggcgattgatgatctccgtcttgaacgctggcaaaaagatcgagatatctttgtgaaaaaggcagaatctctcggcgcgaaagtatttgtacagtctgcaaatggcaatgaagaaacacaaatgagccagattgaaaacatgataaaccggggtgtcgatgttcttgtcattattccgtataacggtcaggtattaagtaacgttgtaaaagaagccaaacaagaaggcattaaagtattagcttacgaccgtatgattaacgatgcggatatcgatttttatatttctttcgataacgaaaaagtcggtgaactgcaggcaaaagccctggtcgatattgttccgcaaggtaattacttcctgatgggcggcagcccggtagataacaacgccaagctgttccgcgccggacaaatgaaagtgttaaaaccttacgttgattccggaaaaattaaagtcgttggtgaccaatgggttgatggctggttaccggaaaacgcattgaaaattatggaaaacgcgctaaccgccaataataacaaaattgatgctgtagttgccagtaacgatgccaccgcaggtggggcaattcaggcattaagcgcgcaaggtttaagtgggaaagtagcaatctccggccaggatgcggatctcgcaggtattaaacgtattgctgccggtacgcaaactatgacggtgtataaacctattacgttgttggcaaatactgccgcagaaattgccgttgagttgggcaatggtcaggaaccaaaagcagataccacactgaataatggcctgaaagatgtcccctcccgcctcctgacaccgatcgatgtgaataaaaacaacatcaaagatacggtaattaaagacggattccacaaagagagcgagctgtaagcgttacgccccagcgcggagcgggggcgtgatttctctccatgccgcgtgaatgaattggcttaggtggagtcgttatgccttatctacttgaaatgaagaacattaccaaaaccttcggcagtgtgaaggcgattgataacgtctgcttgcggttgaatgctggcgaaatcgtcagtctttgtggggaaaatgggtctggtaaaagtacgctgatgaaagtgctgtgtggtatttatccccatggctcctacgaaggcgaaattatttttgcgggagaagagattcaggcgagtcacatccgcgataccgaacgcaaaggtatcgccatcattcatcaggaattggccctggtgaaagaattgaccgtgctggaaaatatcttcctgggtaacgaaataacccacaatggcattatggattatgacctgatgacgctacgctgtcagaagctgctcgcacaggtcagtttatccattagtcctgatacccgcgttggcgatttagggcttgggcaacaacaactggttgaaattgccaaggcacttaataaacaggtgcgcttgttaattctcgatgaaccgacagccagtttaactgagcaggaaacgagcattttactggatattattcgcgatctacaacagcacggtatcgcctgtatttatattagccacaaactcaacgaagtcaaagcgatttccgatacgatttgcgttattcgcgacggacagcacattggtacgcgtgatgctgccggaatgagtgaagacgatattatcaccatgatggtcgggcgagagttaaccgcgctttaccctaatgaaccacataccaccggagatgaaatattacgtattgaacatctgacggcatggcatccggttaatcgtcatattaaacgagttaatgatgtcagcttttccctgaaacgtggcgaaatattgggtattgccggactcgttggtgccggacgtaccgagaccattcagtgcctgtttggtgtgtggcccggacaatgggaaggaaaaatttatattgatggcaaacaggtagatattcgtaactgtcagcaagccatcgcccaggggattgcgatggtccccgaagacagaaagcgcgacggcatcgttccggtaatggcggttggtaaaaatattaccctcgccgcactcaataaatttaccggtggcattagccagcttgatgacgcggcagagcaaaaatgtattctggaaagtatccagcaactcaaagttaaaacgagctcccccgaccttgctattggacgtttgagcggcggcaatcagcaaaaagcgatcctcgctcgctgtctgttacttaacccgcgcattctcattcttgatgaacccaccaggggtatcgatattggcgcgaaatacgagatctacaaattaattaaccaactcgtccagcagggtattgccgttattgtcatctcttccgaattacctgaagtgctcggccttagcgatcgtgtactggtgatgcatgaagggaaactaaaagccaacctgataaatcataacctgactcaggagcaggtgatggaagccgcattgaggagcgaacatcatgtcgaaaagcaatccgtctgaataacgcattgaggagcgaacatcatgagcaaaagcaatccgtctgaagtgaaattggccgtaccgacatccggtggcttctccgggctgaaaagtctgaatttgcaggtcttcgtgatgattgcagctatcatcgcaatcatgctgttctttacctggaccaccgatggtgcctacttaagcgcccgtaacgtctccaacctgttacgccagaccgcgattaccggcatcctcgcggtaggaatggtgttcgtcataatttctgctgaaatcgacctttccgtcggcagtatgatggggctgttaggtggcgtcgcggcgatttgtgacgtctggttaggctggcctttgccacttaccatcattgtgacgctggttctgggactgcttctcggtgcctggaacggatggtgggtcgcgtaccgtaaagtccctagttttattgtcaccctcgcgggcatgttggcatttcgcggcatactcattggcatcaccaacggcacgactgtatcccccaccagcgccgcgatgagtcaaattgggcaaagctatctccccgccagtaccggcttcatcattggcgcgcttggcttaatggcttttgttggttggcaatggcgcggaagaatgcgccgtcaggctttgggtttacagtctccggcctctaccgcagtagtcggtcgccaggctttaaccgctatcatcgtattaggcgcaatctggctgttgaatgattaccgtggcgttcccactcctgttctgctgctgacgttgctgttactcggcggaatgtttatggcaacgcggacggcatttggacgacgcatttatgccatcggcggcaatctggaagcagcacgtctctccgggattaacgttgaacgcaccaaacttgccgtgttcgcgattaacggattaatggtagccatcgccggattaatccttagttctcgacttggcgctggtagtccttctgcgggaaatatcgccgaactggacgcaattgcagcatgcgtgattggcggcaccagcctggctggcggtgtgggaagcgttgccggagcagtaatgggggcatttatcatggctagtctggataacggcatgagtatgatggatgtaccgaccttctggcagtatatcgttaaaggtgcgattctgttgctggcagtatggatggactccgcaaccaaacgccgttcttgattttgataaaaattttctcaaagccggttacgtattaccggttttgagtttttgcatgattcagcaggaaaagaaccatgtttactaaacgtcaccgcatcacattactgttcaatgccaataaagcctatgaccggcaggtagtagaaggcgtaggggaatatttacaggcgagtcaaagcgaatgggatattttcattgaagaagatttccgcgcccgcattgataaaatcaaggactggttaggagatggcgtcattgccgacttcgacgacaaacagatcgagcaagcgctggctgatgtcgacgtccccattgttggggttggcggcagctatcaccttgcagaaagttacccacccgttcattacattgccaccgataactatgcgctggttgaaagcgcatttttgcatttaaaagagaaaggcgttaaccgctttgctttttatggtcttccggaaagtagcggcaaacgttgggccactgagcgcgaatatgcatttcgtcagcttgtcgccgaagaaaagtatcgcggagtggtttatcaggggttagaaaccgcgccagagaactggcaacacgcgcaaaatcggctggcagactggctacaaacgctaccaccgcaaaccgggattattgccgttactgacgcccgagcgcggcatattctgcaagtatgtgaacatctacatattcccgtaccggaaaaattatgcgtgattggcatcgataacgaagaactgacccgctatctgagccgtgtcgccctttctagcgtcgctcagggcgcgcggcaaatgggctatcaggcggcaaaactgttgcatcgattattagataaagaagaaatgccgctacagcgaattttggtcccaccagttcgcgtcattgaacggcgcagtacagattatcgcagcctgaccgatcccgccgttattcaggccatgcattacattcgtaatcacgcctgtaaagggattaaagtggatcaggtactggatgcggtcgggatcagccgctccaatcttgagaagcgttttaaagaagaggtgggtgaaaccatccatgccatgattcatgccgagaagctggagaaagcgcgcagtctgctgattagtaccaccttgagcatcaatgagataagccaaatgtgcggttatccaagcctgcaatatttctactctgtttttaaaaaagcatatgacacgacgccaaaagagtatcgcgatgtaaatagcgaggtcatgttgtaacgatgatgagaattgtcggcgtcacatcaggtaacgctgcgtggttgtcggatgcggcgtgaacgccttatccgacctacccgccaggcatgataaaacgcaccaacaacgcttcaggctcgtagctcaactgcctgagacaaagtaaaaagccttatccgactgacaagtcggataaggctcaaggaaatgcaattacatatgcgccgcgattaaccgttggttatcctggtacattgcgaacaggtagttgttataactcttccctttggtgctgtagcccttcagcttgtgaatcatcgctgtggcagtcacttcctgatccgctttacgcagctgcgcacggcttttacggaagctagagtaagccgggtgcgtattcaggttagtgacataggcgctcacgctttctttgacagaactaaactgactgtaccctttcactttacctggcgcattggtacaacgtcctttcatgcatttcatgccgaacaggttgttgttgttgcgcgccagcttgctcgttccccaaccgctttctgctgcagccatcgtcgccaccatactggtggggataatgtctacgcgttcaagcaaggtattccacgggatttttcgcgtattaccggaccacttcaccttgtagcgtttggcgatgtctttcagacgcgcacgctcagcaggactccattggccctgatactgtttactaatgagccagttacgttccgcagtaatggccgcattttggctggtaatgtaaggcattacggtccggagaaacgcctttttccttggtgttccggaagggtattttcgcaaatcaggaagactactactctttgcactattgcgagaatactcttgtttactgcttacctgtttattactagctttagttaagtgggacttttgactcgctgttgttgtgtgcgtcttcgctaacacctcactgctaaacaccagagtgagtaacataagaatcatcgccccatatcgtcgtatgggagtcaaaatcatcaggtctcctggtcggatttaatcattccaacaccttatatttttcacaaatttgagagttgaatctcaaatcatatcaaaaatagctgtcaagagcaccccaaggaatagtccaaatctgaaactatgtcacgtgttaacgattcagattggcgctaaatcgcagaaaatgtgggggttatcgcaaaattcagccgttttttgcgcgagatcgctcacccttgcttctcatcctgtggacttaccgctcagggatgagttttgtttggcttatcgctggcaaactgtctgaaatcgcagcaataaggactcatccgccatgaaactcgccgcctgttttctgacactccttcctggcttcgccgttgccgccagctggacttctccggggtttcccgcctttagcgaacaggggacaggaacatttgtcagccacgcgcagttgcccaaaggtacgcgtccactaacgctaaattttgaccaacagtgctggcagcctgcggatgcgataaaactcaatcagatgctttccctgcaaccttgtagcaacacgccgcctcaatggcgattgttcagggacggcgaatatacgctgcaaatagacacccgctccggtacgccaacattgatgatttccatccagaacgccgccgaaccggtagcaagcctggtccgtgaatgcccgaaatgggatggattaccgctcacagtggatgtcagcgccactttcccggaaggagccgccgtacgggattattacagccagcaaattgcgatagtgaagaacggtcaaataatgttacaacccgctgccaccagcaacggtttactcctgctggaacgggcagaaactgacacatccgcccctttcgactggcataacgccacggtttactttgtgctgacagatcgtttcgaaaacggcgatcccagtaatgaccagagttacggacgtcataaagacggtatggcggaaattggcacttttcacggcggcgatttacgcggcctgaccaacaaactggattacctccagcagttgggcgttaatgctttatggataagcgccccatttgagcaaattcacggctgggtcggcggcggtacaaaaggcgatttcccgcattatgcctaccacggttattacacacaggactggacgaatcttgatgccaatatgggcaacgaagccgatctacggacgctggttgatagcgcacatcagcgcggtattcgtattctctttgatgtcgtgatgaaccacaccggctatgccacgctggcggatatgcaggagtatcagtttggcgcgttatatctttctggtgacgaagtgaaaaaaagcctgggtgaacgctggagcgactggaaacctgccgccgggcaaacctggcatagctttaacgattacattaatttcagcgacaaaacaggctgggataaatggtggggaaaaaactggatcagaacggatatcggcgattacgacaatcctggattcgacgatctcactatgagcctagcctttttgccggatatcaaaaccgaaagtactaccgcttctggtctgccggtgttctataaaaacaaaatggatacccacgccaaagccattgacggctatacgccgcgcgattacttaacccactggttaagtcagtgggtccgcgactatgggattgatggttttcgggtcgataccgccaaacatgttgagttgcccgcctggcagcaactgaaaaccgaagccagcgccgcgcttcgcgaatggaaaaaagctaaccccgacaaagcattagatgacaaacctttctggatgaccggtgaagcctggggccacggcgtgatgcaaagtgactactatcgccacggcttcgatgcgatgatcaatttcgattatcaggagcaggcggcgaaagcagtcgactgtctggcgcagatggatacgacctggcagcaaatggcggagaaattgcagggtttcaacgtgttgagctacctcagcagccatgatacccgcctgttccgtgaagggggcgacaaagcagcagagttattactattagcgccaggcgcggtacaaatcttttatggtgatgaatccagccgtccgttcggtcctacaggttctgatccgctgcaaggtacacgtagcgatatgaactggcaggatgttagcggtaaatctgccgccagcgtcgcgcactggcagaaaatcagccagttccgcgcccgccatcccgcaattggcgcgggcaaacaaacgacacttttgctgaagcagggctacggctttgttcgtgagcatggcgacgataaagtgctggtcgtctgggcagggcaacagtaacttttccggcttcccgttcgtcagtacctcgggaagccgccaaccaggataaaatgtcagccctaatcagcgttgcaggataaagcaccgctcactcttcaacagaccgatttgcaccccagcaaatgtagcgttattgttaccttccttgctacagagttcgacagatatcccgctatgacattctccctttttggtgacaaatttacccgccactccggcattacgctgttgatggaagatctgaacgacggtttacgcacgcctggcgcgattatgctcggcggcggtaatccggcgcagatcccggaaatgcaggactacttccagacgctactgaccgacatgctggaaagtggcaaagcgactgatgcactgtgtaactacgacggtccacaggggaaaacggagctactcacactgcttgccggaatgctgcgcgagaagttgggttgggatatcgaaccacagaatattgcactaacaaacggcagccagagcgcgtttttctacttatttaacctgtttgccggacgccgtgccgatggtcgggtcaaaaaagtgctgttcccgcttgcaccggaatacattggctatgctgacgccggactggaagaagatctgtttgtctctgcgcgtccgaatattgaactgctgccggaaggccagtttaaataccacgtcgattttgagcatctgcatattggcgaagaaaccgggatgatttgcgtctcccggccgacgaatccaacaggcaatgtgattactgacgaagagttgctgaagcttgacgcgctggcgaatcaacacggcattccgctggtgattgataacgcttatggcgtcccgttcccgggtatcatcttcagtgaagcgcgcccgctatggaatccgaatatcgtgctgtgcatgagtctttccaagctgggtctacctggctcccgctgcggcattatcatcgccaatgaaaaaatcatcaccgccatcaccaatatgaacggcattatcagcctggcacctggcggtattggtccggcgatgatgtgtgaaatgattaagcgtaacgatctgctgcgcctgtctgaaacagtcatcaaaccgttttactaccagcgtgttcaggaaactatcgccatcattcgccgctatttaccggaaaatcgctgcctgattcataaaccggaaggagccattttcctctggctatggtttaaggatttgcccattacgaccaagcagctctatcagcgcctgaaagcacgcggcgtgctgatggtgccggggcacaacttcttcccagggctggataaaccgtggccgcatacgcatcaatgtatgcgcatgaactacgtaccagagccggagaaaattgaggcgggggtgaagattctggcggaagagatagaaagagcctgggctgaaagtcactaaaaattgcctgatgcgctacgcttatcaggcctacatgatttctgcaatatattgaatttggaagaatttgtaggccggataaggcgtttacgccgcatctggcataaacaaagcgcactgttccggcgttgagaaacgccggaaaacgtttcaaacaggctgctgccgtagccgatgccgctgcactttctcgacatccatgcactgcaacgcctttgtcgggcaggcttcaacacaggccggtcccgtctcccgatgccagcacagatcgcacttaatcgccctcgcctttttgcggctagaaacgacctccatcgcaccaaacgggcaagccagcatacagcttttacagccaatgcaacgtgtttgttcaacgaaaatatgcccatgttcgcggcttatcgcgtcaacagggcagacattcgcgcacggtgcatcttcacactgatgacaggctactgccgtggtccagcagtggtctttaatgacacgaatacgggaaataaactcgtctggactcaacgcagcgcaatcctgattctcatgatggctcactgcgcaagccacttcacaggtacggcaaccgatacatttcgtcgcatccgcaataataaaccggttcatgatcactcctttgcactaaaacagcagagtgccagagagcgcgtccctactgctttgatccaacgaaggaaatgttaaagttttggcacttgtccaaagcgttatgtgatcgcgcccaggtcatccctgacagtaaatcccagttcattagaaatagcctgcgcggtttcacgcagtggtttcaggagatttttctctcccacctgtttcagacgacttgtgctaaggctaatgctcacggcgtacggcacccgcccatgaatatcaaacaccggaacagcaatacaggagacgccgagttcgttttcttctctgtccatcgccgctccgctttcacgaatgtgcgccagttcgtcgaacatcgcgggcagctcggtaatggtattgcgggttaacggctggatctcatgctgatggctttcccagtaactcttcacgtagtccgggtgaccaaacgccatgtagatcttgcccattgcggaacagtagagcggcatatgctggccaatataggcacgggttcgcagcatcccggttgtgggttccagcttataaatcaaaatagcgtgatcgtcttcgcggctggagaagttaatggtttcaccagtggcgatgttcagtgcctcaagatgcggagcggcgatatgaatgatattcaggctagacagcgccttctgcccgacggcaataaatttggtggtcaggcgataactccctgcggcaggcgcggtggtcacatagccgcaggactgtaatccctgcaataagcgatggacggtactcttatttaaaccagccagctcgctaagatgcgccaacggacaaccgtttggatagttgctcaaaatctcaatcagcatcaacccgcgaaacagactctggcttccggctggacgctctttttcctgcgccatctcgttctctttttttcccatcacttctttccccattttgtcgcgtcctgatggtagcgcaaagtgtgccgtagttcacgatctcgacagataatttataaccaattgatttttatgtcttttgaaattcatcaatcagattgccttgttaaaaagtgatcgatatatttgaaatcaagtttcgcatattgaaattttaagccaaaaaagcgatcaaaaaaacaaggaagcctgggatgaaagtgacatttgagcagttaaaagcagcctttaatcgggtcttaattagtcgcggcgttgacagcgaaacggctgacgcctgtgcagagatgttcgcccgcaccaccgaatccggcgtttattctcacggcgttaatcgtttccctcgtttcattcaacaactggaaaacggcgatatcattcctgatgcccaacccaaacgtataaccagcctcggcgcaattgaacagtgggacgcccagcgtagcatcggtaacctgacagcgaaaaagatgatggatcgcgccattgaactggctgccgatcacggtattggtctggtggcactacgtaatgccaaccactggatgcgcggcggcagctacggctggcaggcggcggaaaaaggctatattggcatttgctggaccaactccatcgccgtaatgccgccgtggggcgcaaaagagtgtcgcataggcactaacccgctgatcgtcgccattccttccacgccgatcaccatggtcgatatgagcatgagcatgttctcttacggcatgttagaagttaaccgtctggcaggtcgtcagctcccggtcgatggtggctttgatgatgagggcaatttgaccaaagaacctggcgttatcgagaagaatcgccgcattttgccgatgggctactggaaaggttctggcatgagcattgtgctggatatgatcgctactctcctttccgacggcgcatccgttgccgaagtcacccaggacaacagcgacgaatacggcattagtcaaatttttattgccattgaagtggacaagcttatcgacggtcccacccgcgatgccaagctgcaacgcatcatggattacgttactagtgccgagcgtgctgacgaaaatcaggccattcgcttacccggccatgaatttactaccctgctggccgaaaaccgccgtaacggcatcactgttgatgacagcgtgtgggccaaaatccaggcgttatgaggagataagtcatgatttttggacatatcgcgcagcccaatccgtgccgtttgcccgccgccattgaaaaggcgctcgattttctgcgcgctaccgatttcaacgccctggagccgggcgttgtcgaaatcgacggcaaaaatatttatacgcaaattatcgatttaaccacacgcgaagcggtggtaaaccgtccggaagtgcatcgtcggtatatcgatattcagtttctggcgtggggcgaagagaaaatcggcattgctattgatacgggaaataataaagtcagcgaaagtctattagagcagcgcaatattattttttatcacgacagtgaacatgaaagttttatagaaatgataccgggcagctacgcaattttctttccgcaggatgttcaccgaccaggttgtattatgcaaacagcctctgagatacgaaaaattgtggttaaagtcgcattaacggcgctgaattaatcgaataatcgtctacgccagaacgcctgggtaatgttattgctctaactatattaataattcaggttgctgcacatgcgacttgaattatgacagacatagcctcaaggaatagctatgaaaaaaatactcgaagcaatactggcgattaatctcgccgtactttcctgtattgtatttataaacattattttaagatatggttttcagacaagcattttatctgttgatgaattgagtcgttatttatttgtctggttaacgtttattggcgcgattgtagcttttatggataacgcccacgttcaggtcacctttctggtggagaaactctcccccgcatggcagcgacgagtcgctctggttacccattccttaatcttatttatttgtggcgcactggcctggggcgcaacgctaaaaacaattcaggactggagcgattatagtccgatcctcggtttacccatcggcctgatgtatgccgcttgtctgcccaccagcctcgttatcgcattctttgaactgcgtcatttatatcaactcatcacgcgtagcaattctctaacgagcccaccgcaaggagcttaatcatggctgtgctgatttttctgggctgtctgttgggtggtattgctatcggtttgcctattgcctgggcactgttgttgtgcggggcggcgttaatgttctggctggacatgtttgatgtccagatcatggcacaaacgctggtgaacggagccgatagcttctccctgctggcgattccgttctttgtgctggcgggtgaaatcatgaatgcgggcggcttgagtaaacgcattgttgacctgccgatgaaactggtggggcataaaccaggcgggctgggctacgtcggcgtgctggcagctatgattatggcgagcctttctggttctgccgttgcggataccgccgccgttgccgctctactggtgccgatgatgcgcagcgccaactatccggtcaaccgggcggcggggctgattgcctctggcggcattatcgcgccaattattcccccttccattccgtttattatcttcggcgtttccagcggattatccatcagtaagctgtttatggcgggcattgcccctggcatgatgatgggcgcaacgctgatgcttacctggtggtggcaggccagtcgccttaatttaccccgccagcaaaaagcaacgatgcaggaaatctggcactcttttgtctccggtatctgggcgctgtttcttccagtcatcattattggcgggtttcgctccggcctgtttacccctaccgaagccggggccgttgctgctttctatgcgctgtttgtcgccacagttatttaccgtgaaatgaccttcgccacactttggcatgtactcattggcgcggcgaaaaccaccagtgtggttatgtttctggtggccagcgcacaagtttccgcctggctgattaccattgctgaactgccgatgatggtttctgatttactgcaaccgttggtcgatagtccgcgtctgctgtttatcgtcattatggtggctatcctgattgtcggcatggtcatggatttaacgccgacggtattaattcttaccccggtattaatgcctttagttaaagaggcaggaatcgatccgatttatttcggtgtcatgtttatcattaactgcagtatcggcttaattacaccgcctatcggtaatgtacttaacgttattagtggggtggcaaaactcaaattcgatgatgcagtcagaggcgttttcccttacgtcctggttttatatagtttattagtcgtatttgtttttattcccgatctcatcatcctccctttgaaatggattaattaaaaggaaaatattatgaaattacgctctgtaacctacgcattattcattgctggcctggctgcattcagcacatcttctctggcggcacaatctttacgtttcggttatgaaacaagtcaaaccgacagccaacatattgcggcgaaaaaattcaatgatttattgcaggagagaaccaaaggcgagctgaaattaaaactgttcccggacagcactctcggtaacgcgcaggcgatgatcagcggcgtacgtggcggcaccatcgatatggaaatgtccggcagcaataactttgccgggttaagtccagtgatgaacttgcttgatgtccctttcctgttccgcgataccgctcacgcgcataaaacgctcgacggcaaagtcggtgatgatctgaaagccagtcttgaaggtaaaggactgaaagtactggcctactgggaaaacggctggcgcgatgtcaccaacagccgcgcaccggttaaaacccccgccgacctgaaagggctgaaaatccgcaccaacaatagcccgatgaatatcgccgcattcaaagtctttggcgctaacccgatcccgatgccgtttgccgaagtctataccgggctggaaacccgcactatcgacgctcaggaacacccgatcaacgtcgtctggagtgcaaaatttttcgaagtgcagaagttcctttctctgacgcaccacgcctattccccgcttctggtggtgatcaacaaagcgaagtttgatggcttaagtccggagttccagcaggcgctagttagttctgcacaagaagcgggtaactatcagcgcaaactggttgctgaagatcagcaaaaaatcatcgacggcatgaaagaagcgggcgtggaagtcatcaccgatctcgaccgcaaagcctttagcgacgcactggggaatcaggttcgcgacatgtttgttaaagatgtgccgcagggagctgatctgctgaaagccgtggatgaggtgcaataaaccatgacgcaatactggctggggttagattgtggcggtagctggctgaaagccgggctgtatgaccgcgaaggccgggaggcaggcgtgcagcgcctgccgctgtgcgcattaagcccgcagccaggctgggcagagcgcgatatggcagaactgtggcaatgctgcatggctgtcattcgcgccctgcttactcattctggtgttagcggggaacaaattgtcggtatcggcatctccgcacagggaaagggcttgtttttgctggataaaaacgacaaaccgctcgggaatgctattttgtccagcgaccgccgggcgatggaaatcgttcgtcgctggcaggaagatggcatcccggaaaaactctacccgctgacccgacaaaccttgtggaccgggcatccggtgagcctgttacgctggctgaaagagcacgaaccagaacgctacgcgcaaattggctgcgtgatgatgacgcacgactacctgcgctggtgtttaactggcgtcaaaggctgtgaagagagcaatatttccgagtccaacctctacaacatgagtcttggggaatatgacccgtgcctcaccgactggctggggatcgctgaaatcaatcacgccctgccgcctgttgtcggatctgccgaaatctgcggggagatcaccgctcagacagccgccctgaccggtctgaaagcgggtacgcccgttgttggcggcctgtttgatgtggtttccaccgcactctgcgccgggatcgaagacgaatttaccctcaatgcggtgatggggacctgggcggtgaccagcggcataacccgcggtttacgtgacggtgaagcgcatccgtatgtctatggtcgctacgttaacgatggtgaatttatcgttcacgaagccagccctacctcttccggcaacctcgaatggtttaccgcacagtggggagaaatcagctttgatgagatcaatcaggccgttgccagcttgccgaaggctgggggcgatctctttttcctgccgttcctgtacggcagcaacgccggactcgagatgaccagtggtttctacgggatgcaggccattcacacccgcgcgcacctgttgcaggccatctatgaaggggtggtgttcagccatatgacccacctcaaccgaatgcgcgaacgttttactgatgttcacaccctacgcgtcactggcggcccggcgcactccgatgtctggatgcaaatgctggcggacgtcagcggtctgcgtatcgagctgccgcaggtggaagaaaccggctgctttggtgcggcccttgccgcccgcgtcggcaccggggtttatcacaacttcagcgaagcccaacgtgacttgcgacacccggtgcgcaccctgctgccagatatgaccgcccatcagctttaccaaaaaaaatatcaacgttatcagcatctcattgccgcacttcagggctttcacgcccgcattaaggagcacacattatgagccgaccacttctgcaactggccctcgaccacagtagtcttgaagccgcgcagcgcgacgtgacgctgttaaaagacagcgtcgatatcgtcgaagcgggcaccattctctgtttaaacgaagggcttggcgcggtgaaagccttgcgcgaacagtgcccggacaaaatcatcgttgctgactggaaggtcgccgacgctggtgaaacgctcgcgcaacaggcgtttggcgcaggcgctaactggatgaccatcatctgcgccgcgccgctcgcgacggtagaaaaaggccacgcaatggcacaacgctgcgggggtgaaattcagatagagctgttcggtaactggacgctggacgacgcccgcgactggcatcgtattggcgtgcggcaggccatttatcatcgcggtcgtgatgcacaggccagcgggcaacagtggggcgaagccgatctggcacgcatgaaggcgcttagtgatatcggccttgagctttccattactggcgggattacccctgctgacctgccgctgtttaaagatatccgcgtgaaagcgtttattgccgggcgggcactggcaggcgcggcaaatccggcgcaagtggctggcgatttccatgcgcaaatcgacgctatctggggaggtgcgcgtgcgtaatcatcagttagggatttatgaaaaagcgctggcgaaagatctctcctggccggagcggctggtgctggcaaaaagctgcggttttgattttgtcgaaatgagcgtggatgaaaccgacgaacggctcagtcgtcttgactggagcgccgcacaaaggactagcctggttgccgcgatgatcgaaacaggtgttgggatcccgagcatgtgcctgtccgcacatcgtcgctttccctttggtagccgtgacgaggcagtgcgcgaacgggcgcgggaaatcatgagtaaagcgattcgcctggcgcgcgatctcggcattcgcaccatccagctggcaggttatgacgtctattacgaagaccacgacgaaggcacccggcaacgttttgctgaagggctggcgtgggcagtcgaacaggcggcggcaagtcaagtaatgctggcggtggagattatggataccgcgtttatgaactccatcagcaaatggaaaaaatgggacgagatgctcgccagtccgtggttcaccgtctacccggacgtcggcaacctcagcgcctggggcaatgatgttcccgccgaactgaaactgggcattgaccgtatcgccgcgatccacctgaaagacacccagccagtcaccgggcaaagtcccggacagttccgcgacgtgccgtttggcgaaggctgcgtcgatttcgttggcatcttcaaaacgctgcataaactgaactatcgcggttctttcctgattgagatgtggaccgaaaaagccaaagagccggtgctggagattattcaggcgcggcgttggattgaagcgcgtatgcaggaggctggatttatatgttaacgtaaatgcaggaggctggatttatatgttagagcaactgaaagccgacgtgctggcggcgaatctggcgcttcccgctcaccatctggtgacgttcacctggggcaatgtcagcgcggtagacgaaacgcggcaatggatggtaatcaaaccttccggcgtcgagtacgacgtgatgaccgccgacgatatggtggtggttgagatagccagcggtaaggtggtggaaggcagcaaaaaaccctcttccgatacaccaacgcatctggcgctctaccgtcgctatgccgaaattggcggtattgtgcatacccacagccgccacgccaccatctggagtcaggccgggctggatctccccgcctggggcaccacccacgccgattatttttacggtgccatcccctgcacgcgacagatgaccgcagaggagattaacggcgaatatgaatatcagaccggcgaagtgatcattgaaaccttcgaagaacgtggcaggagtccggcacaaatcccggcggtgctggtgcattctcacggcccgttcgcatggggtaaaaacgccgccgatgccgtgcataacgccgtagtactcgaagaatgcgcctatatgggtctattcagccgccagcttgcgccgcagctccctgcgatgcaaaacgaactgctggataagcactacctgcgtaagcatggggccaatgcctattacgggcagtaatccctcacgccggggcttcatcgccccggcactacgaattgatatgttccttgctgtaacgccgcttccacgctgctggcgttaaaccagtatgtttctgaaaaatctgccggaaatagccaacgtcattaaaccgtattgcatggagcaggccgacaacgtcgagtcactgcataacctgttgctgcccgccgatgcgccatttacgacatttgaaggcaagggattgttcagccataagatcctgattcagacgccaggttcccggtatgaacagagcaatccagagcaacaacctttgtggcattacgacggagcaccagccgcaccgacatccaccggtgaattaaaaacgccagctcaccccggtgacaaaggtaaaactctcattacgatcaatcatcgggctgtcggtaatctcttccggcagctcgctgtatcctgcgctcgccatcaatacgacgtgctctcctatcgggtattttgccgtcaggctgacatagggcacccaggcatcctgcgcggaataacttgccagaccgctacgacgggactcactctcactaatgccatagtaatagtcactgaaattctcgtcataatagagaacgcccagcgcaggtgtcaggctcagacgacctatctgcattttgtggaatacgcttagctcccccacccagccgttgctgttatccagaacgtccgcagctgcagaggctttcacggttccccaacgctcgtggtgataccaggcaacccccgccatagccgtactatcacgcttatcaagctgttgcatggcataatcgtcattatcggtagggtcaaattccagcggcatccaggatgcggtcaggctaagttcatttttttcactttggctcagaataaaacctaacgtggtctgacgaacataaaaagtatcaccttcataactaatcagcggaattgccttcgtattttcattataaccgcgataagggctttcattataagccgcaccagcaccaatggataattcagaagcagttgcgcttgccataaaaggcaacgcaaataacgccacaatattgcgattaattaacatgtccggtattccattttaaaataagataaaaaagagtcggcataataatgcttacaatttctccggtgcaagattcatatttatatagtaatatataaaattatatataattgggctgttgcgatgacaaaattacaacttaagtaccgggagttaaaaattatcagcgtaatcgctgccagtgaaaatatcagccatgccgcgactgtacttggcatcgcacaggccaacgtcagcaaatatcttgctgattttgaaagtaaagtgggtttaaaagtctttgaccgaaccacccggcagctgatgctcacaccttttggcaccgcgctgttaccgtacatcaacgacatgctggacagaaacgagcaacttaataattttattgcagattataagcatgagaaacgtggtcgggtcaccatctacgccccaaccggcataattacctatttatccaaacatgtaatcgataaaattaaagatatcggtgatatcaccttaagcctaaaaacctgcaatcttgagcgtaatgccttttatgaaggcgtcgaatttcctgatgattgtgatgttttaatcagctacgctccaccaaaagatgaaagcctggttgccagttttattacccaatatgccgtaaccgcttatgccagccagcgctatcttgagaaacatcccattagccgtcctgacgaactcgaacatcactcctgtattttgatcgacagcatgatgatcgacgacgcgaatatctggcgcttcaacgtcgccgggagtaaagaggtgcgggattatcgcgtgaagggaaattacgtttgcgacaacacgcaatctgcgctggagctggcacgaaatcacctggggattgtgtttgcgccagacaaaagtgtgcagagcgacctgcaagacggcacgctggtgccctgctttcagcaaccctatgaatggtggctggatctggtggctatcttccgtaaacgggaataccagccctggcgggtccagtatgtgctggatgaaatgctgcgtgaaattcgccaccagcttgctcagagccagcaactgcggcctgaacaagcggcggaaagcgaagattaatgatcgagataaaggtaatgcacccagctggtcatgcgtaatagcactttgcgcatcacgctgacatggctgaaatgatcagagtaaaccgccacctgggcgtaaataccgtctggtaaagcgctcaaatcagtgtgctcatccagttcaatggtcgcgataacgccatcactacccggcgctgtgtttaacgtctgtaaggtgccggtgctctgataagctccgccgggaacggctggactaatggctgccagcttaccgctgaataccttacctggcagagcattaaacaccacttccgcatcgtcgccaggagccagtcgcagcaaggagttctgacggaactgcgccacgatttgtcgtttctgatcgggtataaacaccatcaccggacgtagcggcaggctcgcggcataggtacccggacgaatcagtacctgggtcacataaccatcgctcggcgcacgcactatcgtctgctcaaggttatattttgcttccgcgagctgtgctttcaggctggcgatttgagaatgttcacccaacaccaggctatccagctggctctggatctgtttttgttccgccgcgctactcttcacggaggcttcctgcgccagataattttgccgcgccacatcgatatcgcgttcactaaacgggtttactttcgcctggctgccacgtgcgtaacgctgatactctttagcgaatttatcccgcgtggcctttgcctgctgagtattcgccgccatctcatctaactctgcgcccaacgcccgctgtttatgttctgcggtaacgatatccgccatcagccgatccacccgcgcctgataacgcgtcgggtccagtcgaaatagcacctcaccttttttaatcagcgtatttttcttatccgtcacttcaatcaccacaccagtcacctgtgggacaacaggaatagaaataaccgctttttgcgctttaaaggtatacggatggttatagttcattaacagaattagaccgctgacaataaatattccacccagggccgctgtgggaatggtccatttatttacgggaattttgaagatcttaaacattgcccatgcaaaagccacataggtcaaaataatcagtaaatccataagtattactcggcagaagaggatttgatgtcggcgagctgtttctccagcccggcaatgcgctgttgcagttgcataacggaactatcatggctttgcattccccatccccgctccgggcggtaaagcgtggcccaaatccacaaaaacggccagataacatgtaacgtaaaaagactcacccaaccagcaacatgaatggcgtcggcatgaggatgattacgttttttggcaatcaggtagggaatatcatgtaaaataatgatcccatagaagatcaccagaaatacaaaaataagcactcccagtgcaaaatagtccaggaacatatttccctcaaagaatataaaaaagaacaattaacgcatattatgaaatgccatgatgcagtgcaatttccttatttatataacgacatattgttttttatatactttcttaaatgtgctgtctggtttttcaacaggacgaggtttatcatattgaaatagtggaactattggccaaactaatgaataactccagtaaaacatccacagtacagattaagcgtattaaaccttcaattatctaccgtttattgctgattggcctcggatcaccaatggtgatttacggcctggttcgcccgctcaccatcgaaacgcgagattaaactcctgacaaaacacgccccagaaacgtacttctgttggcgtagtctgggttattgcgcacgtaggtttaaaacgtaaattgtaacaacgtgcgctttgtttatgccggatgcggcgtgtacgccttatccggcctacggtcaggttcccgtaggcatgataagacgcgtaagcgtcgcatcaggcaatgaatacccaatgcgaccagcttcttatatcagaacagccccaacggtttatcgctgtagctcaccagcaggcacttggtttgctggtaatgctccagcatcatcttgtgggtttcgcgaccgataccactttgtttgtagccaccaaacgccgcatgtgccgggtaagcgtgataacagttggtccacacgcgcccagcctgtatgccgcgccccatcttataggccagattaccgttgcggctccagacgcccgcgcccaggccatattgcgtatcgttcgccagctccagcgcttcttccatcgttttgaaggtggtcaccgccagcaccgggccaaaaatctcctcctggaacacccgcatattgttctgaccaaacagaatcgtcggttcgaggtagtagccgtctttcagttcaccttccagcagcttgcgccgcccgcctgtgagcacgtcagcgccctcttttttaccgatatcaatgtagttgaggatggtttccagttgcccgtgagaaacctgcgcgcccatttgcgtcacgctgtcgagcgggttaccgctacgaatgctttcgacacggcggatggcgcgttccataaagcgttcgtagatagattcctgcactaaagcacgactcggacaggtgcaaacttcgccctggttaaaggcaaacagtgcaaagccttccagcgctttatcgaaaaaggcatcttcttcatccatcacatcagcaaagaagatatttgggctcttaccgcccaactccagcgtcaccggaataatgttttgcgttgcgtattgcataatttgttggcccacttccgtactgccggtaaacgccactttggcgatgcgtttgctggtcgccagatattcgccaattaccccacctgcgccattgaccacgttcaccacgcccggcggcagtaaatcaccgacaatttccattagcagcagtacagaaagcggggtaagacgtgcgggtttcagcaccacacagttgcccgccgccagcgcgggagccattttccagctcgccatcagcagcgggaagttccacgggataatctgccccaccacgcctaacggttcatggaaatgataggccacggtttcgctatcaacttcactgatcccaccttcctgcgcccgaatacagctggcgaaatagcggaaatggtcaatcgccagcggtacatccgcagcactggtttcgcgaatgggtttgccgttatcccaggtttcagctgtcgctaacagctcgaggttttgttccattcgatcggcaatcttaaacagaatcgccgcacgatcctgcacgctggtgtgcgcccatttatctttcactttgtgcgcagcatccagcgccagatcgatgtctcgtttgccgctagacgccacttcgcacagcagctgcccggtcaccggcgtcagattctggtaatactcgccgtcggcaggggctacccattcgccgccaataaagttgtcatagcgggcttttaacttgagggggaaaccatactcgccgggcttaatctgtgcactagggggattattggtcatgatcgtctccttgcggtgtgaggtataacaagggtagacgtgactggcgaaatcttcgccagtcggtaacagctttacgacagctatcacgaatttacgggcaagggttacagagatagttgaaaaagcggctaacaatttgccagccgttgtggaaatgatgattacatcgctgcgcgataaatcgccacaatttcttcgtgagttgcctggatcgggttagtaaagccacaggcatctttcagggcattagtcgccaataccgcgaaatcttcttctttcacgttcaggtcgcgtaggcctgccgggatatccactttcttcgccagttcacggatggcgttaatgcaggcttcagcaccttccgcgtcgtttttacctgtcacgttcacgcccattgcagcggcacagtcacgcagacgtgcagcggcgactttgctgttgaatacctgaacgtgcggcagcaaaacggcgttacatacaccgtgtggcaggttgtagaaaccgcccagctggtgcgccatcgcatgaacataacccagagaagcattattgaacgccataccggcgaggaactgggcataagccattgcttcacgcgctttcgcattactgccatcttcaacggctaacggcaggttttcggcaatcatggtcacggctttcagtgcacaagcgtcagtgatcggcgtggcggcaatagaaacatatgcttcgatagcgtgcgttaaggcatccatacccgttgcggcggtcagactcttcggcataccaatcatcagagaggagtcattgacagaaagcagcggagtgacatgtttatcaacaatcgccattttgatatgacgcgcttcgtcagtgatgatgcagaaacgggtcatttcagaggccgtacccgccgtggtattgatggcgatcatcggcagctgcggttttgcagagcggtcaacgccttcgtaatcgcgaatatcgccgccattggctgccaccagcgcaataccttttgcgcagtcgtgtggagaaccaccgcctaaggagatcacgctatcgcaattattctctttaagtaatttcaaacctgcggcgacgttttccgtggtggggttaggttgggtgccatcataaataacgctaaaaatattgcgttcttccagtgctttttgcacatcgcccgccatacctaatttcgttaacatattgtcagtgacaattaaggtacgggtaaatccataatctgccatcatattcattgcatcagtcaaactatcagcgccgatgacattcacagaaggaataaagaacgtactagctgccataacacactcctgaaagtgtaaaaaagggcgggcagcttactgaggattttcattcgaaaatatgatcagtattattgattatcaaaattaatctaataaaaagcacattgtattcattaaacaatgtgctttttttaaattcataagaattttgtattaatttattttaaaacttaattaatcatttccttatttttccggaaataataatgcgtcgcgcaataaatgatcatttccacgacgacgcgtaaagccaatgcggtcaaaatattccagaatctgaattgccagctttcggcctacgcctaagcgatcgcggaaatccgccgcgcaggtactaccacactcctgatcgagatcgcggatcatattggcaaactcgacaatccgatcgttacggtaataacgatctttaacgatcgcggtaattattccttgctgcgccgcctggcgtagagtcaggcgcattgcctgctcgtcggttcccgtctcttttgccaggtcacgcacccaccacggttcgtcaccaaacagtggctctgctttttgccagatggcctgctgctcttcgctgaagcccgctttgtgatctggcagatgcagccagccgtgatggctgtggatgtcgccgctttcgcgcatcttttcaatcagcaacagtaccagcgcttcatcttccattggcaacgccatacgtcgcagacgttcgcgcccagggccaggttcatcgcgatgttgctcatgataagtcgctaatgtgtcgagaattttccgctgccagcgggcggcaaccggcgcattcaacaagctataaccagcctgaatataaccaggctgttgcagcaattcgcgcatcccttcgccgttgagctggcgcgcccaggcgaaatccgcaaggttaaccgcgccgcgttccagatgaacagataacgcatcggcatcgctctgcgcccgtgcaagagacgccagccattgcagatattccggcttacgtttaccgcgacgcggcgggttaagcatcacgacgcgcgctccggccagcgtgttgcgggcagagatatcgcgcaataccaggcggtcgttatctgccagccataacggggtgtcgaagaccagttcagcaaggttatcttccagcagactaacgcgtcccgtgacgtggctggcggcgtggtgaatatgcagcggctgccactgggtcagcggtgtatgggtttgaagctcgacaatcacccgtgtgaacggctctggcggcacatcggcaagcagccagtcgccacggttaatctgctctttttccgcatcacccgcgatgttaagcgcgatacgctgcccggcattggcggtttctgttggctggttttgcgcatgcagcgcacgtacacgcatcggtttatttacaccagtcagccagagactatcgcctaccttcacttccccgcttaacgccgtaccggtgacgaccagcccggcaccttttacggtaaatgcgcggtcaatcgcgaggcggaaactatgttggctggcgtgctcgcgttccggcaactgaagcagatgctcgcgcagggcatccattccccgaccttcggttgctgcggtgataaacagttttgcctcagcaaaaccgtattcccgcagaacctcctttacctggcgttcaacctcatcaacacgcgcttcgtccacgcgatcggctttggtcagcgccactgtcagcatcgggttaccggtcagctgcaaaatcgccagatgctcacgggtctgtgccatcacgccgtcatcgcacgccaccaccaacagcgcgtgatcgataccaccaacgcccgccagcatgttggaaagaaacttttcatgaccgggaacgtcgataaaaccaggcacgcgaccatccggctgcggccagtaggcatagccgagatcgatggtcatgccgcgctttttttcttccggcagacggtcagcatttacgccagtaatcgcctgcaataaggttgttttgccgtggtcaacgtgtccggcagtcgcaataatcatttcaacaacatctccaaaaaccgttgctcatcttcaaggcagcgtaaatccagccacaatcgtccgtcataaatacgaccaatcaccggcactggcaattcacgccagcgggcggctaaactctcaaggtggctaccgcgtccatcatggggtgtaaacgttaatgccgcgctcggcaggcgatcaaccggcaggctaccactgccaatctggctaagacatggcataacctgtaccgcaaactccgcgccgtaatgtgcggcaaggggggcctgtaaacgttgtgcctggatttgaatgacctctgcgctgcgggtaagcaggcgcagggtcggtaatttttcactcagagcttcagggtgtaaataaagacgcaacgtggcttccagcgccgcgagggtcattttatccgcgcgtaatgcacgcttcagcgggtggctttgcaggcgggcgatcatctcttttttaccaacaataattcctgcctgcggcccgcctaacaacttgtcgccggagaaactcaccagactgacgcccgccgcaatcaactcctgcggcattggctctttcggcaaaccgtactggctaagatcgaccaggctgccactgcctaaatcagtcactacgggaacatccagctctttgccgagcgccaccagttccgcttcatctatcgctttggtgaacccctgaatgctgtagttactggtatgtactttcatcaacagtgcggtattttcattcaccgcctgacgataatcattcgcgtgcgtgcggttggtggtccctacttcgtgtagggtgcagcctgcctgacgcataacatcgggaatacgaaacgcgccgccaatctccaccagttcgccgcgagataccaccacctcttttccgctggcagtggccgccaacatcaataacaccgccgccgcattgttattgacgatacaggcatcttccgcccccgtaatacggcacagcagctgcgccagcgcccgatcgcgatgtccgcgtccggcgtcgtccagatcatactcgagggtcactgggctacgcatagcctgcgcaacggcttccaccgcggcttccgcctgtaaagctcgcccaaggttggtatgcagcacggttcccgtcaggttgatcaccggacgcagcgcgctctgcgcttctttcgtcaaccgggcatcgacttcttgcgcccagttttcacaccacgcaggcagcgtctggctgccacgaatcacttctcgcgcttcgtcgagcatctgacgcaacaattccaccacgcgggtgtgaccataagtatcacgcaaagaaaggaaggagctatcgcgcaataagcgatcaatagccggaagttgactatagagggaacgcgtttcggttgtcataggaaacctggctgatcaaggccctctcacacggagaagggcgtttaacataaccacggattgtaacgtgagatgggtcaggaggacatatcgcgcatcaagcctttggcggttcggtgcgagcaaaactttcgcggctaaacaggttttcgaccagtttgactaagtgtgggcggtcgacacaccaacctggcgcaacgcggcggaaattgagatatccgacggcacaggcaatggcgatagtcgccagattgaccgtatcggttttgagtgtgccatcgaccagatatccttccagcacatccagactgcggttgattttctcccgctggcgtaacaattcatcttcagactgctgcgccgctggacgcgcctgttcacgcacgcttaccagcccggcatccataatgccatccgccagtgcctcaattttgcgcacccgcaagctctccagcggatcgcgcggcaacatcgccggagcgacattcattaattcaatatattcagcgatgatcgggctatcaaaccagcattcgccctcttcggtcaccagcaccggcacttttcctaacgggttaaattgcgccacgccgttgtccgcgttatagggcagttcattaataaattcgaaagttatgcccttttctaacaacagaatagaaagtttgcgtacaaacgggctggtgtagctaccgacgagtttcatgccgagtcctttgtgcgaggaaaaatatcagtatggctcaatgatccaaataaagataatgcatccagctggtcattcttagcagcactttccgcatcacgctaacatggctgaaatggtcggagtaaaccgccacctgggcgtagatgccgtcgggtaaggcatcgatatcatcgttagggtccagttcaatggttcccagcacaccgtccgtgccgggcacgaccgttaaactttgcaataccccctgcgcctgataagaaccgcctggcacgacaggtaaaatactagtcagtttgccgtgaaacacctgcccaggtagcgcgttaaacaccacttccgcatcatcgccaggtttcagacgtaacaggctgttttgccgaaattgggcgacaatttgccgtttttgctcggggatgaagaccatcaccggacgcagcggcaaggcagctgcgtatgtacctgggcggatcagtacctgagtaacgtagccattgctcggcgcgcgaatgacagtctgctcaaggttatattttgcttcagtaagttgcgctcttaagctcacaatctggctttgctcgccgttaaccatactgtcgagctggctctggatctgcgcctgctccgccacgctgcctttcaccagcgcatcctgcgcgaggaaattttgccgcgcatcgtcgatgtcacgttcgctgaacggattcaccgccgcctggctgcctttcaagtaacgttgataatttttaaacagacggtcgcgctccgcactaacctgggtggtgttggcctgcgcttcagtgagctgcgcacgcagcgtctttatattatgcgtcgccgtcatcaggtcagcctgaagtctgtcaactcgcgcctggtaacgaaccgggtcgagcttaaaaagcacctcgcccttttgaataagctgattattcttgtcagtgacttcagtaacaattcccgtcacctgtggcgtgatagggatcgctatcactgccttttgcgcggtaaaagtgtaagggtggttgtagttcatcaacaaaatcaaaccactcaccagaaacacgcctcccagcgccgccgtcgccagcgtccactgatttaccggaatgcggaagattttaaagaccgcccacgccagcgccacgtaagttaaaacaatcaatagatccataattagatctccgggaacgtggaatagtcagtctttttctcggcggcgagttgatgctccaaccgggaaattcggtcagaaagtgcggcgatttccgggtcagtcgctttctcctggctcgcaacatgactctgcataccccagccacgctccggttgatagagcgtcgcccagatccacagaaacggccagataacatgcagagtaaacaggctcacccagcccgccgtatgaatagcgtcggcatggggatggttgcgctttttggcaatcagataagggatgtcatgtatcgcgatgattccataaaaaatcaccagaaagacgaagatcagcactcccaacgcgaaatagtttagaaacatatctgcctcggattcacgtttatcagtgttgtttttgggctggcagccagaagggagtcaggctgatattttgacaataatccgggttcgcgattctcgccataacaccaaagaataatttttagaggtgatgagttgcttagttacataacgattgtatgacgaaggcataacatgctgtagatcacatcaggtgaacgccgtaagaaaatatcttgtgattcagatcacaaagattcaacaaaccatcaaaacaaaaatgtgacactactcacatttaaatgccatttttagcgaaaatcgccgccttgttgcttttttacacaagcgttttgtgatgaacgtcacgtcaattacctctctaccccctatatttatgtgattgatatcacacaaaaggccgtcgactggacagttaaccgattcagtgccagatttcgcagtatctacaaggtccggctacctctgccgccacattaacaaaaaacctcgggcttccagcctgcgcgacagcaaacataagaaggggtgtttttatgagttccgatattaagatcaaagtgcaaagctttggtcgtttcctcagcaacatggtgatgccaaatatcggcgcgtttatcgcgtggggtatcatcaccgcgttatttattccaacagggtggttaccgaacgagacgctggcgaagctggtcgggccgatgatcacttatctcctgccgctgctgatcggttataccggtggtaagctggtaggcggcgaacgtggcggcgtagtcggtgccatcaccaccatgggcgttatcgtcggcgcagacatgccgatgttcctcggttctatgattgcaggtccgctgggcggctggtgcattaagcacttcgaccgctgggtagacggtaagatcaaatccggttttgagatgctggtgaataacttctccgcaggcatcatcgggatgatcctcgctattctggcattcctcggcattggcccgattgttgaagccctgtccaaaatgctggctgcgggcgttaacttcatggttgtccatgacatgctgccgctggcgtctatctttgttgaaccggcgaaaatcctgttcctcaacaacgccattaaccacggtatcttcagcccgctgggtattcagcagtcccatgaactgggtaaaagtatcttcttcctgattgaagctaacccaggtccaggtatgggcgtgctgctggcgtacatgttctttggtcgtggtagcgctaaacagtctgcgggcggtgcggcaatcatccacttcctggggggtatccacgaaatctacttcccgtatgtgctgatgaatccgcgtctgatcctcgcagtcatcctcggcggtatgactggcgtgttcacgctgactatcctgggcggtggtctggtttctccggcatctccgggttctatccttgctgtactggcgatgacaccaaaaggtgcttacttcgctaacatcgcgggtgtgtgtgcggcgatggctgtctccttcgttgtctctgctattttgctgaaaaccagcaaagtgaaagaagaagatgatattgaagcagcaactcgtcgtatgcaggacatgaaagctgagtctaaaggcgcatctccgctgtctgctggcgatgtgactaacgacctgagccacgtacgtaaaatcatcgttgcctgtgacgccggtatgggttccagtgcgatgggcgcaggcgttctgcgtaagaaaattcaggatgcaggtctgagccagatttctgttactaacagcgcgatcaacaacctgccgccagatgtggacctcgtcatcactcaccgtgacctgaccgaacgcgctatgcgccaggttccgcaggcacagcatattagcctgaccaacttcctcgacagcggcctgtacaccagcctgaccgaacgtctggttgctgcccaacgccacacggcaaacgaagagaaagtaaaagacagcctgaaagacagctttgacgattccagtgctaacctgttcaagctaggcgcggagaacatcttcctcggtcgcaaagcggcaaccaaagaagaagcgattcgttttgctggcgagcagctggtgaaaggcggttacgttgagccggaatacgttcaggcgatgctggatcgtgaaaaactgaccccgacttatctgggtgagtctatcgcggtgccacacggtacggttgaagcgaaagatcgcgtactgaaaacgggcgtcgtgttctgccagtacccggaaggcgtgcgcttcggtgaagaagaagatgacattgcccgtctggtgattggtattgctgcccgtaacaacgagcacattcaggttatcaccagcctgaccaatgcactggatgatgagtccgtcatcgagcgtctggcacacaccaccagcgtggatgaagtgctggaactgctggcaggtcgtaagtaatccaatcccaccctctccacatggagaaggtggggttaattgcctgatgcgctacgcttatcaggcctacaggatgcatcacaatttgttgaatttgcacgttcttgtaggccggataaggcgcttacgccgcatccggcgctgcccctctcctcacggagagggtttgggtgagggaaaagcctcaccccagccctctcgggtaaaaacattgatgaaggttaatactatgaaagcattacattttggcgcaggtaatatcggtcgtggctttatcggtaaactgctggcagacgcgggtatccaactgacgtttgccgatgtcaatcaggtggtacttgatgccctgaatgcccgtcatagctatcaggtacatgtggttggtgaaaccgagcaggtagataccgtttccggcgtcaatgctgtcagcagcattggtgatgatgtcgttgatctgattgctcaggttgatttagtcactaccgccgttggcccggttgtgctggaacgtattgctccggcaatcgccaaagggcaggtgaaacgtaaagaacaaggtaatgaatccccgctgaacatcatcgcctgtgaaaacatggtacgcggtaccacgcagctgaaaggccatgtgatgaacgccctgccggaagacgccaaagcgtgggtagaagaacacgttggctttgtcgattccgccgttgaccgcatcgtaccgcctagcgctagcgcaactaacgatccgctggaagtgacggtagaaaccttcagcgaatggattgtcgataaaacgcagttcaaaggcgcactgccgaacatcccaggcatggagttaaccgacaacctgatggcatttgtcgaacgtaaactcttcaccctgaacacgggtcatgctataaccgcgtacctcggaaaactggccggtcatcagaccattcgtgacgcgattctcgacgagaaaatccgcgcggtggtaaaaggtgcgatggaagaaagtggtgcagtattgatcaagcgctacggctttgacgctgacaagcatgcggcgtacatccagaaaattctcggccgttttgagaacccgtatctgaaagatgatgtagagcgcgtaggccgtcagccactgcgtaaactgagtgctggcgaccgtctgatcaagccactgctcggtacgctggaatatggtctgccacataaaaacctgattgaaggtattgccgctgcaatgcacttccgcagtgaagatgatccgcaggctcaggaactggcagcactgatcgctgacaaaggtccgcaggcggcgctggcacagatttccggtcttgatgccaacagcgaggttgtatccgaggcggtaaccgcttataaagcaatgcaataatggtggaccaggcgcaggacaccctgcgcccgaataacagattgagtgatatgcaggcaacaatggaacaaacccaggcctttgaaaaccgtgtgcttgagcgtctgaatgctggcaaaaccgtgcgaagctttctgatcaccgccgtcgagctcctgaccgaggcggtaaatcttctggtgcttcaggtattccgcaaagacgattacgcggtgaagtatgctgtagaaccgttactcgacggcgatggtccgctgggcgatctttctgtgcgtttaaaactcatttacgggttgggcgtcattaaccgccaggaatacgaagatgcggaactgctgatggcattgcgtgaagagctaaatcacgacggcaacgagtacgcctttaccgacgacgaaatccttggaccctttggtgaactgcactgcgtggcggcgttaccaccgccgccacagtttgaaccagcagactccagtttgtatgcaatgcaaattcagcgctatcaacaggctgtgcgaagtacaatggtccttagtctgactgagctgatttccaaaatcagcttaaaaaaagcctttcaaaagtaagcaacgtctgcttactgcccctctacctgcttcggccgataaagccgacgataatactccagacgttgtagatataacggcacgctttcatcgggtattccggacggaatcgcgttacggggaggaagttttttcagatactcccggaacgcctggctacttgccatgaaatctacggctttatcgataagaagcggaacgttttcacctaatttgcccatgatgatatctccgtattaccccgcgccgggaatgcgcggccgccaattttagtttaggttcccggtaaagatgacattaaggaaaacgtgctgaatcctcaataatcatccgctgctgtttattatcttttttctatagatttcttaattaatcaacgaattgcgcagtttttgagcatgttaatgattacgttacagaactattacaatgtcattagttgtgaacaaagcacctggtcgcgcatactaggggctataaatttatctttatcagaagccatcacatgaaagaagtcgaaaaaaacgaaatcaaacgcctcagcgatcgcctggacgccatccgccaccagcaggccgatcttagcctggttgaagccgcagacaaatatgccgagctggaaaaagagaaagccacgctggaagcagaaattgctcgcctgcgtgaagttcatagccaaaaactgagtaaagaagcacagaagctgatgaagatgccattccagcgcgcaattaccaaaaaagagcaggctgatatgggcaagctgaagaaaagtgttcgcggactggtcgttgtgcacccaatgaccgcactgggccgcgaaatgggcctgcaggagatgactgggtttagtaagaccgcgttttaagaacacagtatctacagggtgattctgcacattcctataggccgagtaaggtgttcacgccgcatccggcaagataaggcgctctggatcaacaacctaagggcaattctctgatgaggattgcccttttctttaccagacatctccccccacaagaattggccctaccaattcttcgcttatctgacctctggttcacaatttcccaattaaaactcacatcaatgttgccaatacataacatttagttaaccattcattgtcattatccctacacaacacaattggcagtgccacttttacacaacgtgtgacaaggagatgagcaacagactcattacacgatgtgcgtggactccaggagacctgcaatgaatctctggcaacaaaactacgatcccgccgggaatatctggctttccagtctgatagcaagccttcccatcctgtttttcttctttgcgctgattaagctcaaactgaaaggatacgtcgccgccagctggacggtggcaatcgcccttgccgtggctttgctgttctataaaatgccggtcgctaacgcgctggccagcgtggtttatggtttcttctacgggttgtggcccatcgcgtggatcattattgcagcggtgttcgtctataagatcagcgtgaaaaccgggcagtttgacatcattcgcagctctattcttagcataacccctgaccagcgtctgcaaatgctgatcgtcggtttctgtttcggcgcgttccttgaaggagccgcaggctttggcgcaccggtagcaattaccgccgcattgctggtcggcctgggttttaaaccgctgtacgccgccgggctgtgcctgattgttaacaccgcgccagtggcatttggtgcgatgggcattccaatcctggttgccggacaggtaacaggtatcgacagctttgagattggtcagatggtggggcggcagctaccgtttatgaccattatcgtgctgttctggatcatggcgattatggacggctggcgcggtatcaaagagacgtggcctgcggtcgtggttgcgggcggcagctttgccatcgctcagtaccttagctctaacttcattgggccggagctgccggacattatctctagcctggtaagtctgctctgcctgacgctgttcctcaaacgctggcagccagtgcgtgtattccgttttggtgatttgggggcgagtcaggttgatatgacgctggcccacaccggttacactgcgggtcaggtgttacgtgcctggacaccgttcctgttcctgacagctaccgtaacactgtggagtatcccgccgtttaaagccctgttcgcaagcggtggcgcgctgtatgagtgggtgatcaatattccggtgccgtacctcgataaactggttgcccgtatgccgccagtggtcagcgaggctacagcctatgccgccgtgtttaagtttgactggttctctgccaccggcaccgccattctgtttgctgcactgctcagcattgtctggctgaagatgaaaccgtctgacgctatcagcaccttcggcagcacgctgaaagaactggctctgcccatctactccatcggtatggtgctggcattcgcctttattagcaactattccggactgagtagtacactggcgctggcactggcgcacaccggtcatgcattcaccttcttcagcccgttcctcggctggctgggggtattcctgaccgggagcgataccagttctaacgccctgttcgccgcgctgcaagccaccgcagcacaacaaattggcgtctctgatctgttgctggttgccgccaataccaccggtggcgtcaccggtaagatgatctccccgcaatctatcgctatcgcctgtgcggcggtaggcctggtgggcaaagagtctgatttgttccgctttactgtcaaacacagcctgatcttcacctgtatagtgggcgtgatcaccacgcttcaggcttatgtcttaacgtggatgattccttaatgattgttttacccagacgcctgagtgacgaggttgccgatcgtgtgcgggcgctgattgatgaaaaaaacctggaagcgggcatgaagttgcccgctgagcgccaactggcgatgcaactcggcgtaagtcgtaatagtctgcgcgaggcgctggcaaaactggtgagtgaaggcgtgctgctcagtcgacgcggcggcgggacgtttattcgctggcgtcatgacacatggagcgagcaaaacatcgtccagccgctaaaaacactgatggccgatgatccggattacagtttcgatattctggaagcccgctacgccattgaagccagcaccgcatggcatgcggcaatgcgcgccacacctggcgacaaagaaaagattcagctttgctttgaagcaacgctaagtgaagacccggatatcgccagtcaagcggacgttcgttttcatctggcgattgccgaagccagtcataacatcgtgctgctgcaaaccatgcgcggtttcttcgatgtcctgcaatccagtgtgaagcatagccgtcagcggatgtatctggtgccaccggtttttagtcaactgaccgaacaacatcaggctgtcattgacgccatttttgccggtgatgctgacggggcgcgtaaagcaatgatggcgcaccttagttttgttcacaccaccatgaaacgattcgatgaagatcaggctcgccacgcacggattacccgcctgcccggtgagcataatgagcatagcagggagaaaaacgcatgattatttccgcagccagcgattatcgcgccgcagcgcaacgcattctgccgccgttcctgttccactatatggatggtggtgcatattctgaatacacgctgcgccgcaacgtggaagatttgagtgaagtggcgctgcgccagcgtattctgaaaaacatgtccgacttaagcctggaaacgacgctgtttaatgagaaattgagcatgccggtggcactggctccggtgggtttgtgtggcatgtatgcgcgtcgtggcgaagttcaggcagccaaagcggcggacgcgcatggtattccgtttactctcagcacggtttccgtttgcccgattgaagaagtcgcgccagccatcaagcgcccaatgtggttccagctttatgtactgcgcgatcgcggctttatgcgtaacgcgctggagcgagcaaaagcagcgggttgtagcacgctggttttcaccgtggatatgccgacaccgggcgcacgctaccgtgatgcgcatagtggtatgagcggcccgaacgcggcaatgcgccgctacttgcaagcggtgacacatccgcaatgggcgtgggatgtgggcctgaacggtcgtccacatgatttaggtaatatcagtgcttatctcggcaaaccgaccggactggaagattacatcggctggctggggaataacttcgatccgtccatcagttggaaagaccttgaatggatccgcgatttctgggatggcccgatggtgatcaaagggatcctcgatccggaagatgcgcgcgatgcagtacgttttggtgctgatggaattgtggtttctaaccacggtggccgccagctggacggtgtactctcttccgcccgtgcactgcctgctattgcagatgcggtgaaaggtgatatagccattctggcggatagcggaattcgtaacgggcttgatgtcgtgcgtatgattgcgctcggtgccgacaccgtactgctgggtcgtgctttcttgtatgcgctggcaacagcgggccaggcgggtgtagctaacctgctaaatctgatcgaaaaagagatgaaagtggcgatgacgctgactggcgcgaaaagcatcagcgaaattacgcaagatagcctggtgcaggggctgggtaaagagttgcctgcggcactggctcccatggcgaaagggaatgcggcataatcgtttgcgccccctcaccctaaccctctccctcagggagaggggaccgttcggcgctgtatgtactccctcactctgaaacgacaccgcactctttttttctccctcgcccctccggggagagggccggggtgaggggaaaaggccgcactgctcaccaattttctgctatcctgcccccgcactaagggggcagtatgctaaacatcgtactttacgaaccagaaattccgccaaatactggcaacatcatccgtctttgcgctaataccggctttcgtctgcatatcatcgaaccgatgggatttgcctgggacgataagcgcctgcgccgcgcggggctggactatcacgagtttaccgccgttacgcgtcatcatgactatcgcgcgttcctcgaagcagaaaatccccagcgcctgttcgccctcaccacgaaaggtacacctgctcacagcgccgtaagctatcaggatggcgattatctgatgttcggcccggaaacacgcggcctgccagcgagcattcttgatgccctgcccgctgaacaaaaaattcgcattccgatggtgccggacagccgcagcatgaatctgtccaatgcggtgagcgtagtggtgtatgaagcctggcggcagttggggtatccgggagcggtattgagagattaattactgtaggccggatagatgattacatcgcatccggcacgatcacaggacattagatcccatccccatactcaaatgtatggttaataccgttgaaatgctggtccatatccatacttggcttatcgctgtctggtttaccgacaatacgagccggaacgccagcggcggtggtatgcggcggcaccggttgcagcaccacggaacctgcgccaatcttcgcgccgcgcccaacttcaatattgccgaggattttcgcgcccgcgccaatcatcacaccttcacgaattttcgggtgacggtcaccaccagatttacccgtaccgccaagcgtcacagattgcagaatgcttacgtcgttttcaatcaccgccgtttcaccaacgacgatgcctgtcgcgtggtcaagcatgataccgcgaccaatttttgctgccgggtgaatatcgacctggaacgtcacagaaacctggttttgcagaaagattgccagtgcgcgacgcccctgattccacaaccagtgaccgatgcgataggcctgcaaggcatgaaaacccttcaggtataacaacggggtactgtatttatcgactgccgggtcgcgggtacgcaccgcctgaatatcacaggccgcagaggcgatcatttccgggtcagcggcgtaggcttcttccaccacttcacggatagcaatagcaggcataattgggctactcagcttgttcgccagcatgtagctcagtgcactgccaaggttttcgtgcttgagtagcgtcgcgtggtaaaaactggccagcattggctcacagtccgccagcgttctggcttcggctttaatattgttccagacaatttccagttcttcacagctcattgcttactccacacgatgagataatgaccggcccgttctgcgcgggccgggtcatagcggtaacaaaggttccctggggttagtggctgctgcgctcgtccttgcgtgcacgacctagtaaagtcaatgctgcctcgcgcgcgttttttccgcaatataatacttgataaatttcctcggttattggcatttcaacgccgaagcgatgcgccagttcgcggacttctttcgtattgcggtagccttccaccacctgaccaatcttctcctgcgcgctttgtacatccatgccctgaccgagcatcatgccaaaacggcggttacggctctggttgtcggtacaggtaagcaccagatcgccaagccccgccatgcccataaaggtggcagggtcggcacccagcgccgcaccaagacggctcatttcagccagcccacgggtgatcagcgccgtacgcgcattcgcaccaaaaccgataccgtcggacatccccgcaccaatggcaataacgtttttcaccgcgccgccaagctgcacgccaatgaaatccggattgctgtaaacgcggaaacttttgccgcagtgcagcagctgctggagatcatcggcaaaggtctgatcggtgctggccaggctaatagctgtcggtaaacctgccgccagttctttcgcaaacgttgggccagagataaccgccagcggaatttgatcgcctaaggcctcacgcgccacgtcctgtaacagacgtccggtttccgcttccagccctttggtcgcccacaccagacgcgcatcaggacgcatcagtggtttaatctggcgcagcacttcaccaaagacatggctgggtacgacgacgagaatattacggctggctgccagcgcagtggcgagatcgctttcaagatggagcgtatcgggaaaaggcacatcggggagaaacgcggcgttacagcggtcgcgttcaagcgttgcgatatgttcagggtcatggccccagaggacaacctcgtggccatttcttgccagggtgatggcaagagcggtgccgtagctgccggcaccgatcacagtcatactagcattacgttggttcatcaggcatcctgatgttcttcagtaccttcgccagcctgctgctgcaaatagttcatgaacagcgcatcgaagttaaccggcgcaaggttcagttgcgggaatgtaccgcgggataccatgctggtgatgcactcacgagcatacgggaacagaatgttcgggcagtatgctcccaggcaatgcgccatctgggtgccttcgatacccgcgatggagaaaataccgccctgctgaacttcacacaggaacgcggtttcttcgcccaaagaggccgttacggtaacacgcagtaccacttcgtatacgtcatctgccagttgggaagatgccgtatccagatcaagtttaacttctggttgccaatctttctggaaaacgtgcggcgcgttcggcgcttcgaaagagatatccttggtataaatacgttggatctggaaagtcatttcagtgttgttttgttcactcatgtgtagaaaacccttaagtgttgtccttaaatactgcgcaatgtaatgccaacgttcacacgttatttcagcaggggatccagtccaccacgtgcatccaatgcatacaagtcatcacagccgccaatgtgctgtgcgtcaataaaaatctggggaaccgtggtgcgaccgctgcgtttgatcatctcttcacgcttggcggcgttgccatcgatcggcagctcctggaaactcacgcccttgctgctcagcagtgcttttgcacgatggcaatacgggcaggtttctttggtatagatttcaacattggccataaattagctcctgtttttttaccctgaaatttcatgttgcagggcggcagcaaaatggagtgtccccagaagcttataacaataagtcgctgggggcctaattgcagctaacggcctgcatcatgaaagacgacaggtaaattatttgccgcgcaccaaaggcaagttttcgccagcccagccagcgacgccttctttcagcacgaatacttgcgcaaaaccagctttcgtcagtgcgtttgcaggctcctggcactgcatgccagaaccgtctaccacgataaccggtttgtctttgtgcttctcaagctcaccaacattgttggctttgatttcgctcggcaacagattaatagaacctgcgatatggcctttacggaagtcatcacgctgacgtaaatccacaaccacagcgtcttctttgttgatcagacgcgtagcttcaccacgagtaatcaccttcactttgctggtcaggctcttaaacgtagtcacaagaaccgccaccagtaacgcgatccaggcgatactcagtatgggatgacggccaacaaattgcataatttcttgcatggggggtaacaactcccgacgtagtgattaaaaaaaccaggaaaggagtatacctgcgcggtgcggcaaatacagccagcgcgttaactggaatgcaattttgcggggcgcgacgaaaaaaaagcgtaaatctggcatcggcttgccgcgagcggtcgtatattttgatcttcagaggctattttatcgattcagctgtagtaaaattacgcaaattttgactcttgagtatgaggttgtcgcaatgttggtttctaaaaaacctatggtactggtgattctggatggctatggctatcgcgaagaacagcaggataacgccatttttagtgctaaaaccccggtaatggatgcactgtgggccaatcgtccgcataccctaatcgacgcttccggtctggaagtcggtctgcctgaccgtcagatgggtaactccgaagtaggccacgttaacctgggtgccggccgcatcgtgtatcaggacctgactcgtctggacgttgaaatcaaagatcgcgctttctttgctaatccggtgctgactggcgcggtagataaagcgaaaaacgcaggcaaagcggtacacattatgggtctgctctccgcaggcggcgtacacagccacgaagatcacatcatggcgatggtagaactggcagctgaacgcggcgcagaaaaaatctacctgcacgcattccttgacggtcgcgacactccgccgcgcagtgctgaatccagcctgaaaaaattcgaagaaaaatttgccgcgctgggcaaaggccgcgtagcgtccatcattggtcgttactacgcgatggaccgcgataaccgttgggatcgcgtagaaaaagcttatgacctgctgactctggcgcagggcgagttccaggccgataccgccgttgctggtttgcaggctgcttatgctcgcgacgaaaatgatgaattcgtgaaagcgaccgttatccgtgctgaaggtcagccagacgcggcaatggaagacggcgatgcactgattttcatgaacttccgtgctgaccgcgcgcgtgaaatcactcgtgctttcgtgaacgctgatttcgatggcttcgcgcgtaagaaagtggttaacgtcgatttcgtgatgctgaccgaatacgccgctgacatcaaaactgcggttgcttacccacccgcttccctggttaacaccttcggcgagtggatggcgaaaaacgacaaaactcagttgcgtatttccgaaaccgaaaaatatgcccacgttactttcttcttcaacggtggcgtagaagagagcttcaaaggcgaagatcgcattctgatcaacagtccgaaagtggctacctacgatctgcaaccggaaatgagctccgcagagctgaccgaaaaactggttgcggccatcaagagcggcaaatacgacaccatcatctgtaactatccgaacggcgacatggtaggtcacaccggggtgatggaagcggcggttaaagcggttgaagcgctggatcactgcgtggaagaagtcgcgaaagcggttgagtccgtgggtggacaactgctgatcaccgctgaccacggtaacgctgagcagatgcgcgatccggcaacgggtcaggcacacacggcacacaccaacctgccagttccgctgatttacgttggtgataagaacgtgaaagcggttgaaggcggcaaactttctgacatcgcgccgaccatgttgagcctgatgggtatggaaatcccgcaagagatgactggtaagccgctgttcatcgtggaataatccctccccatgaggggaaaggcgattaataccatgacacgggccgtgaaaccgcgcaggtttgcaatcaggcccatcatctacgccagcgttcttagcgctggcgtattgttgtgcgccttttccgcccacgcggatgagcgtgaccaactcaaatctattcaggctgacatcgccgcaaaagagcgcgcggtacgccaaaagcaacaacaacgcgcaagcctgctcgcacaattgaaaaagcaggaagaagcgatctctgaagccacccgtaagctgcgcgaaacgcaaaacacgctcaatcaactcaataaacagattgatgagatgaacgcgagcattgccaaactggagcagcaaaaagccgcccaggagcgcagcctcgccgcacaactggatgccgcattccgtcagggcgagcataccggtattcagctgattctcagcggtgaagaaagccagcgtggacagcgtttacaggcttatttcggctatctcaaccaggcgcgacaagaaaccattgcccagttgaagcaaacgcgtgaagaagtcgccatgcagcgtgctgaactggaagagaaacagagcgagcaacaaacgctgttatatgagcagcgcgcccaacaggcgaaactgactcaggcgctgaacgagcgtaaaaagacgctggcagggctggagtcttccatccagcaaggtcagcaacagttgagcgagctgcgcgccaacgaatcccgtctgcgtaacagcattgcccgtgcggaagccgcggcgaaagcgcgtgcagaacgagaagcacgtgaggcccaggcggttcgcgaccgccagaaagaagcgacgcgcaaaggcaccacctacaaaccgaccgaaagcgaaaaaagcctgatgtcccgtaccggtggtctgggcgcgccgcgtggtcaggcattctggccggttcgcgggccgacgctgcatcgctatggcgaacagctacagggtgaattacgctggaaaggtatggttatcggtgcttctgaaggtactgaagttaaagcgattgccgacggtcgggtgattctggctgactggctgcaaggctacggtctggtggtggtggttgagcatggtaaaggcgacatgagtctttacggctataatcagagcgcactggtgagcgttggtagccaggttcgcgcgggccagccgattgcactggtgggcagcagtggcggtcagggtcggcctagtctctatttcgaaattcgccgccagggtcaggcggtcaatccacagccgtggttgggaagataagttttgtttccatttcgtcgtaacgttcttgcatttgccgctctgttggcgctctcctcccccgtacttgctggcaaacttgccatcgtcattgatgattttgggtatcgcccgcacaacgaaaaccaggtgctggcgatgccttccgctatctccgtcgctgtattacccgatagtccgcacgccagagagatggcgaccaaagcgcataacagcgggcacgaagtgttgattcatctcccgatggcaccgttgagtaaacagccgctggagaaaaatacgctacgcccggagatgagcagcgacgaaattgagcgcattattcgtagtgcggtcaataacgtgccctatgccgtggggatcaacaaccacatgggcagcaagatgacctctaacctgtttggtatgcagaaagtgatgcaggcgctggagcgttacaatctttacttcctcgacagcgtaaccatcggtaatacccaggcgatgcgcgccgcgcaaggcactggcgtgaaggtgatcaaacggaaggtattcctcgacgatagccaaaatgaagcggacatccgtgtgcaatttaatcgcgcaattgacctggcgcgtcgcaacggtagcaccattgccattgggcatcctcaccctgcaacggtacgcgtgttgcaacagatggtttataacctgccgccagacattacgctggtgaaagccagcagcttgctgaatgaaccgcaggttgatacttctacaccgccgaaaaacgctgtgcctgatgcaccgcgtaatccgttccgtggcgtgaagctgtgcaaaccgaagaaaccgatagaacctgtttatgctaatcgcttctttgaagtattaagcgaaagcatcagccagagcacgctgatcgtttacttccagcatcagtggcaaggctggggcaaacagcccgaagcggcgaagtttaacgctagcgcaaattaattagcgcaaattaaaggcgctacgcgtaatgcgatggtggctccgcgttttgtcgcgccattgccataagcggaaagaccacagtaacgcctggtaaccgaccttcacgctgcgcacattggtaatcaggcgcttatacataccggaagtaaatatctcggcaatcatccgttggcgggtaagaatatccggctctttgcgcaccgcatggcaaacacgcaatgcctcgtaagttatttgctgatgaaattccggataaatcataattttgtcggcataatttcgatttaatttctccagcaggcgggtaatcttaatatagtgacgttgataattaaggtttttattcccttgtctatgcaaccgactcacactcgtattatgcagataatatttatataaactttgctcggtatatcgcgcacgcagcgcgttaaacatgaattctgttgtccagacaatatcctgatgatgtaatccggcaataaatttaatgttatttttaacaataacatcacggcgataaacccccatccagacaacgtgagtccaacggcggctagaaagccccatccgcagccagtccgggccggttaatacgccggtactgcgaaggcgatcggtggggatggattgccaggtttctcccgtttcacgaaaacaccagtcagcgttgcactgcgccacgtcgaggtcgtcctctaacgccatggtcatcagcgtttcgtacatggtgggatagacttcatcgtcagcatcgacaaaagcgacatatttgcccgttgccacttcaatcccacgattacgcgccacgcttgcgccagcattcgcctgatgcaacaaacgaacgtgcggatagttttctgcgtaatactttgctatttcaacagaattatccgtactaccatcgttaataataatgatttccagagcagtccaggtttgcgtaattaaagattccatacaagtgcggaaatcatcgcccgcattatataacggaataataacactaagtttattggtgctgttcatcataaattaccgacgacctctgaagttatcctgacgttttacaggctttgtattaagaaactattaagcctgtgagatattatttttacaggtgagagagtcacttcagggtagagagataatgagagcagctatataagagatcagcacaattacgaactctttattacactgacaggattttacatatttaacagattatcctcagataaaagggctggaataccagcccttgttcgtgttaatcccagctcagaataactttcccggactggccgctacgcatagcgtcaaagcccttctggaaatcatcgatagagaaacgatgggtaatgatcgggctaagatcgaggccagactgaatcagcgccgccatcttgtaccaggtttcaaacatctcacgaccgtaaatacctttaatgaacaagcctttaaagatcactttggtccagtcgatagacatatcagacggcggaatacccagcatcgcaatacggccgccgtgattcatggtgtcaagcatggtacgaaacgctggcggcgcaccggacatttccagaccgacatcaaaaccttcggtcatgcctaactccgccatcacgtcattgagattttctttggcgacgttaaccgcacgggtgatacccattttacgcgccagctcaaggcggtattcgttaacatcagtgatcaccacattgcgtgcaccaacgtgtttcgccaccgccgctgccataataccaatcgggcctgcaccagaaaccagcacatcttcgcccaccagatcaaagctcagcgcggtatgcacggcgttaccgaagggatcaaaaattgcggctaagtcatcggaaatattgtcggggattttgaaggcgttgaatgccgggatcaccagatattcggcaaagcagcccgggcgattaacaccaacgcctatcgtgttgcggcacaaatgggtacgaccaccacgacagttgcggcaatgaccacaggtgatatggccttcgccagaaacgcgatcgccgatcttgaagcctttcacttcctgaccaatacctaccacttcaccgacatattcatggcccacgaccatcggcaccgggatggttttttggctccactcatcccagttatagatgtgaacgtcagtcccgcagatggctgttttacggattttaatcagcagatcgttatgcccgagttccggtacaggaacgtcggtcatccagatgccctcttccgctttcagtttggataacgctttcatctcacatcctcaggcgataacgcccagttgtttaccaatacgcgtaaatgcttctactgcacgcgtaatttgctcaggggtatgcgccgcagacatctgggtacgaatacgcgcctgacctttcggaacgaccggatagaagaaaccggtaacgtaaatgccctctttttgcagctcacgggcaaatttctgcgccactaccgcatcaccaagcatgaccggaataatggcgtgatcggctcccgccagggtaaagcccgccgcgctcatttgctcacggaactgacgcgcgttcgcccacagacggtcacgcagttcgctgcccgcttcgaccatctccagtactttgatggacgcggcaacaatggccggtgccaggctgttggagaacaggtacggacgagaacgctggcgcagccactcaaccacttctttgcgcgccgcggtataaccaccagaagccccgcccagcgctttaccaagcgtaccggtgataatatcgacccggcccatcacatcgcagtattcatgggaaccacgaccattttcaccgacaaaaccgaccgcgtgggagtcgtctaccatcaccagggcatcatatttatctgccagatcgcaaacgcccttcaggttggcaatcacgccgtccatactgaacacaccatcggtggcgatcagcacatgacgcgcaccggcttcacgcgcttctttcagacgtgcttccagctcctgcatatcgttgttggcatagcgatagcgtttagctttgcacagacgcacaccatcaataatagacgcgtggttcagtgcgtcggagataatggcgtcttccgcacccagaagcgtttcaaacaggccaccgttagcatcaaagcaggaagagtagagaatcgcatcttccatccccaggaaggccgccagtttttgttcaagctctttatggctgtcctgagtgccgcaaataaaacgcacgctagccatgccgaaaccgtgagaatccattcccgcctttgccgccgcaatcagatcaggatgattcgccagcccgagatagttgttggcacaaaagttaatgacgtggcttccatcagccacagtgatatctgcttgctgcgcagacgtaataatgcgctcttctttaaacaacccttccgcccgtgcggtttccagatcgttggttaactgctgataaaattctccacgcattgcgattctccagacagggcaaattccagcacatattacccaaacttataggtcgcgacgagataacgcgttaacacttctgcaaaattcaggataaataacgtgtaacttgatgtctctcaacacctacagatagtagaaaaactgtacagttttggctgggcataatgatgattgattttactgcattgatataaaaagaaaaaatgatgccaaagcatcatttttcctatctcagttggtatcaaaacgctacccactaatggagggaaacttattttctactaaggaaaattctcagcgcctgcatttttgcccctaaagtgttactcctgaagcagcgaaacaaatcgaaccattttcctctccccagatagtttaggttgaagagatcggggcgtttgtaatagcacatgacaaaaatgccctggtcatcgtccacaatgttattatttagtgttattttttgactttccagaactaatttatagaattctttccatttatgctgactaccaacaattgcgcccccaataatatatacatgattgccaatcatgaaatcaaaaacctgttgttgagatgtgacagtaagccctttttttatagtgaaaagatgcatcttactttcatcaaatgggaaatcccaaattttcaatcctcgagttacatttggcttatggcaatagccaaaatctatccacgcaacaagaggcgttttcactaagcccatgttgatagctttatttacaaaataggccttaaggttacataccaaaacatactctggactccagtactctgggttttttaattgtcgaggctcaagtctatttgtaaagctctcatctttttgaattttttcgatacgacttctgatatatctaaatttcttttttatatcgataacgataaccgttgttggttttccgttgcgaatcgcttcaacccttggtttcaaatcgggagaagtgaaaataatcatctcattttcaagtgcggccagacgctcaaagtaactaaaataaacatcaacactacgagctagtttttcacggaaccctttattagcagtccaatcccctctaccaatgtcaaaatatgcagtgataattgtggtggaacttttcattactaataagaccattaatataaaaaaagaattatatcataaatattaatagaatgtatactgtatattatccattcaaatgcttccgttatttatcatacatcggaatattgatactaaagcactattcacatgcaaaaccaacatccgccatgaaggactagctaaaacccaaactagtttgttgcaattagcatccttgcacctctatgtaaagggctgaagggattcggatgtgatggtatgattacagacattcgtgtctgagattgtctctgactccataattcgaaggttacagttatgatcatcgttaccggcggcgcgggctttatcggcagcaacatcgttaaagccctgaatgataaaggcatcaccgatattctggtggtggacaacctgaaagacggcaccaagtttgtgaacctggtggatctgaatatcgcagactatatggataaggaagacttcctgatccagattatggctggcgaagagttcggcgatgtcgaagcgattttccacgaaggcgcgtgctcttccaccaccgagtgggacggcaagtatatgatggataacaactatcaatactccaaggagctgctgcactactgcctggagcgtgaaatcccgttcctgtacgcttcttccgcagccacctacggcggacgcacctccgactttattgaatcccgcgagtacgaaaaaccgttgaacgtctacggttacagtaaattcctgtttgatgaatatgttcgtcaaatcctgcctgaagcgaacagccagattgttggcttccgttatttcaacgtttatggaccgcgtgaaggccataaaggcagcatggcgagcgtcgctttccatctcaacacccagcttaacaacggtgaaagtccgaagctgtttgaaggtagcgagaacttcaaacgcgacttcgtctatgtgggcgacgtggctgatgtgaatctgtggttcctggaaaatggcgtttccggcatcttcaatctcggtactggtcgtgcggaatccttccaggcggtagctgatgctacgctggcttatcacaagaaaggccagatcgaatacattccgttcccggataaactgaaaggccgctatcaggcgttcactcaggcagatctgacaaatctgcgcgcggcgggttacgacaaaccgttcaaaaccgttgctgaaggtgtaacggaatacatggcctggctgaatcgcgacgcataagagctctgcatgaaaatactggtgatcggcccgtcttgggttggcgacatgatgatgagccaaagtctctatcgcacgctccaggcgcgctatccccaggcgataatcgatgtgatggcaccggcatggtgccgtccattattaagccggatgccggaagttaacgaagctattcctatgcctctcggtcacggagcgctggaaatcggcgaacgccgcaaactgggtcatagcctgcgtgaaaagcgctacgaccgcgcctacgtcttacccaactccttcaaatctgcattagtgcctttcttcgcgggtattcctcatcgcaccggctggcgcggcgagatgcgctacggtttactcaacgatgtacgcgtgctcgataaagaagcctggccgctaatggtggaacgctatatagcgctggcctatgacaaaggcattatgcgcacagcacaagatctgccgcagccattgttatggccgcagttgcaggtgagcgaaggtgaaaaaagttatacctgtaatcaatttagccttagtagtgaacgtccgatgattggtttttgcccgggtgcggagtttggtccggcaaaacgctggccacactaccactatgcggagctggcaaagcagctgattgatgaaggttatcaggtggttctgtttggcagcgcgaaagatcatgaagcgggcaatgagattcttgccgctttgaataccgagcagcaggcatggtgtcggaacctggcgggggaaacacagcttgatcaagcggttatcctgattgcagcctgtaaagccattgtcactaacgattctggcctgatgcatgttgcggcggcgctcaatcgtccgctggttgccctgtatggtccgagtagcccggacttcacaccgccgctatcccataaagcgcgcgtgatccgtttgattaccggctatcacaaagtgcgtaaaggtgacgctgcggagggttatcaccagagcttaatcgacattactccccagcgcgtactggaagaactcaacgcgctattgttacaagaggaagcctgacggatgcgggttttgatcgttaaaacaagcagcatgggcgatgttctccatacgttgcccgcactcactgatgcccagcaggcaatcccagggattaagtttgactgggtggtggaagaagggttcgcacagattccttcctggcacgctgccgttgagcgagttattcctgtggcaatacgtcgctggcgtaaagcctggttcagcgcccccataaaagcggaacgcaaagcgtttcgtgaagcgctacaagcagagaactatgacgcagttatcgacgctcaggggctggtaaaaagcgcggcgctggtgacgcgtctggcgcatggcgtaaagcatggcatggactggcaaaccgctcgcgaacctttagccagcctgttttacaatcgtaagcatcatattgcaaaacagcagcacgccgtagaacgcacccgcgaactgtttgccaaaagtttgggctatagcaaaccgcaaacccagggcgattatgctatcgcacagcattttctgacgaacctgcctacagatgctggcgaatatgccgtatttcttcatgcgacgacccgtgatgataaacactggccggaagaacactggcgagaattgattggtttactggctgatagtggaatacggattaaacttccgtggggcgcgccgcatgaggaagaacgggcgaaacgactggcggaaggatttgcttatgttgaagtattgccgaagatgagtctggaaggcgttgcccgcgtgctggccggggctaaatttgtagtgagcgtggatacggggttaagccatttaacggcggcactggatagacccaatatcacggtttatggaccaaccgatccgggattaattggtgggtatgggaagaatcagatggtatgtagggctccaagagaaaatttaattaacctcaacagtcaagcagttttggaaaagttaagtagtttataaaggtaaaacatgctaacatcctttaaacttcatagtttgaaaccttacactctgaaaagtagtatgattttagagataataacttatatattatgtttttttagtatgataattgcattcgtcgataatactttcagcataaaaatatataatatcactgctatagtttgcttattgagtctaattttacgtggcagacaagaaaattataatataaaaaaccttattcttcccctttctatatttttaataggcttgcttgatttaatttggtattctgcgtttaaagtagataatagcccatttcgtgctacttaccatagttatttaaatactgccaaaatatttatatttggttcttttattgttttcttgacactaactagccagctaaaaagtaaaaaagagagtgtattatacactttgtattctctgagttttctaattgctggatatgcaatgtatattaatagcattcatgaaaatgaccgcatttcttttggtgtaggaacggcaacaggagcagcatatagtacaatgctaatagggatagttagtggcgttgcgattctttatactaagaaaaatcatccttttttatttttattaaatagttgcgcggtactttatgttctggcgctaacacaaaccagagcaaccctactcctgttccctataatttgtgttgctgcattaatagcttattataataaaagtcccaagaaattcacttcctctattgttctactaattgctatattagctagcattgttattatatttaataaaccaatacagaatcgctataatgaagcattaaatgacttaaacagttataccaatgctaatagtgttacttccctaggtgcaagactggcaatgtacgaaattggtttaaatatattcataaagagtccttttagttttagaagtgcagagagtcgcgctgaaagtatgaatttgttagttgcagaacacaataggctaagaggggcattggagttttctaacgtacatctacataatgagataattgaagcagggagtctgaaaggtctgatgggaattttttccacacttttcctctattttagtctattttatatagcatataaaaaacgagctttgggtttgttgatattaacgcttggcattgtggggattggactcagtgatgtgatcatatgggcacgcagcattccaattatcattatatccgctatagtcctcttactcgtcattaataatcgtaacaatacaattaattaagaataaacaagtttaagaagtgagttaaaactcacttcttatctatacaacttaatctctttacactattagttaaagtttcagtatcgatatcttttaccgtatatgttggggatactatttgtatagatttatgatgattcggggaccaaattaaatggctgggatattccggagtacgactattagggtaaaatgcaagcgttggtttatgataagccgcagcgatatgaacaagagctgtatcaacagaaatgacaaaatcactatacttggtcaacgcaacggtataaataaactcatcaaatggtagtgtttcgatttcaagtattggtattgtcaataaatcttgcggtaacccggtaaatataatccgataattttcaaagtgtgttttcacttcttgatatataacttttatttgctcaaacgtaagacggcatattttttttgcacctaatggattaataatgactattcttgtatctccaataaattcttttattttatcttcaacatctactggtaaatgcaagtcgtagttggtggaaaatttaccctcaccataaatatgcttcagtatttctattgctcgtgtactcatatgttcttttaaacattcatcgtggggatggtaaaaactatagtaacgcttataccaatgatcaaaacccagaatgtaagaatcttttaaactacttaatattaagctatgcttaaaactgggcatagtttcaaaggggtctaatacaatatcgaactgtaaatcccgcagatgcttacatagagtaagcatttcaagaaaaccggtactttctttaatacagaactcaaatatatttttattattagagagaaattccccaccctttctatttgtgagaagagttattttaacccctttactataaagttcacgataaatgctacttaatacaattagatcaccaagtttattattatcatgaataataaggcaacttttaacttgtgctggatctgtaatttgattatttattttattacgaaataaaaaagaaaggaaattaatcttgattttgtttatataaaatcttttctttttgtgaaaagttcctaagcgcatttttataccatattattttagtttcaggatgattaattagcataagaatcggtactagttctatattgcattttttttcttgtcatatctttactttcttctgcactgatgtcttgaagtttaataaatggaattacatcgtaagaaatagctgtatcatcacttaaattataaatattaatatcttttacattatcatgcataaaacgaaaaaatggcaatattttgaataaatccctacttaattcgctgggcatgggatttttattctcatcatagaaacgagaacagctacccgttaaatcaagaccagaacaaataatccgcgcatacttaagactatatgcgatttgaattgcagcaaaggcaatagtatggcaactgcaataaccaagactaatgtccttgcaaaatccaaccagacgaccttttttagacaacggtacagagatcagcagttctttgtgaatctgtctcaaaatattaaatttaatcttctttataaaaccacctttttcccgacggtaaaaggaccgtaatacgaggcagttctggaggatataaagtttatcttctttggaagcgtgttcataaacgtcaacgtttactatggtataacgacttctctggctaaatttataaaaatcatcacgacgctgatgtaaaaatcggacatctgtaagtacatatataaaaggaacgatattattacttaacagatattgcgcagaaccattgacagcaataatatcctttgttcgtaatacactcaaaggtgttttttggcttgtagggccgctaagaaaaataataacatcatcagatattttattttcaatcaggttttcaacatcttttttgtcaatgtatctaatattcttcatgataaacctgtgaaataaataactccgcttaaaactgtcctggtgaagacatgtaattgtgggattttttttagcgcgctggtttccctttcaaacgccgcataaaattgcgcatttttttacgatatactaaaagataatagcctagatctctaatctcatttttaataccgtaatgacgctctaagtcaatacgatctttcgctttacgctgcgcactagcacgctttccggagagatcgataattcgaacctcaccattttttataatgaagttaccacgatgggggtcgccagaaaccatgccatgttgatgtaaggcattaatactttgctgaattttattttttagcgcatcatcaatatcgggcatatcacacaactctatgccatcaatatactcgatgatcatgatataagtatggacaaaacgtaaggttttccgttcagccaataaataaaagtcattgagtgtatttaacccttcatttcgtactttttgggtttgctcaaaaaggcgttcgtaataatcaccttttaacagagacttaaagaaacgttcgttacgcttaactttcggagaaaaaaccttaagaatcaatttaccgtaatcggtatcaataagcataacttttgtatcatcaatagaacgaaaaaccttgatgatatttatattataagacaagaagtcatttaatacattgaggtacttactattgttttcatcggtaaaaacaaccaagtctttgatcttgctcttctgaatcataataaaccagttaaatgttatttacggtaatattttcggcaaagataacagactcctgctataattcctgagatataatgatgttgcactaaaagatgtttatatcttttttaaattcaataattgatttcgcatctcgtggagagtcatctttccagggggaattttctaaagctattttatagtattttaccgatggataaattgcccatttgtgccacggtttagttgcacctgtataatgaataagaagagtactttctgtaatcagctttttatagttttgatgtgttttgtcttttaattcacttttaattgtataaattgtattgtactcacgaggcaaaaataatgtcatccctttcagtaagacattcataacatcctgatcagggtatttataaacattatctttactcataagaatagacaacgctttttctgttagttttgcgtcagcccattttcttaagtctaaataaacgacaccggaattaaagtactgcccaagtaattcaggatcagacaacctggataccgccttttcttgcattggctcaacatctttaacaacagcagcaaccgctccatttaaacccagatgtaatagttggctaatatcgcctttacaaacaacatctgcatcaagataaagcaaacgatcaagcgttaaacccaataattgaaatgcaaataaacggaagtacattgctcttgaccagacctgtgtacaaggcaagcactggagcttatcagtgttaattctatataacgtgattcttaattggttttgctctgcaagctttgcaattttttgaaaaaaaccatcattataaacatcagcaataatataaaaatcaagattaatatgtcgattatttaggacaattgatgtgatggaaacacctacaccatcaagataattagcatcgacaccataggcaacatttaaacattcagaagtatttatattagctagccgaaaatcccaggctttaactttatctatctctatggcaggaaatgagtccacaatgctacccttatatcattactttatagtttcccagttttaatgctttatcttttcaataaaataaaaaagatagttgctaaatccttttagatatctatgctttttaagcatatgttttgcgctatatcttaattgattgctattgttcggtttcagcaacgccgtattcttccatgggctagcattttttgcctccataaaggcttgacttacaggataatcccaggcccaatcatgccagggcttggttggcccgatataatggataaaaatagtatcgttggttactgggtttataaagctttctttgagttgataatttaagctgaactgggtgttatatttaatatcagcgaaaataagtttatccgccagcaacatatttaacacatcctgatcaggatgtgttatttttttgattatttctggctcatttagcattgcaatagctcgtgcagaaacctgctgagccgcccattgggcagtattaatcaataaaaaaccggagttaaagtaacctttagcaattcccgcaacacctaagctatgggcgcgtttttcccaccagtcagcttgcccttctgtaacaaccattgcgactttatcgtcaggaaaactgaaattaattagtggctcaatagtcccctgacaaatgatatctgcatccagataaaggactttaggcgccttattaataaagtaatctgcaataacaaaacgaaaatatattgcatgagtccaattcttagtgctaggcaaactgcgcagtcgatcaccattaatcagatatattttaattctggttttatactgcaacgccagggcatcaaaatacttacgatcatcatcaccaaaataatcagtaaaaatatggaaacacaatcgacttccttcattatattttaatatactagcaatgctaattccgcaaccaaatagaaagtttttgtcagttccataagcgatgtccagacaaagattttctgtttctactttatgatcataatcaataacactattaagaaactcagtttcctggaaaaacacctgctgcattatttcctccgggaaatagcagaaataattaccttatgtaatctatcgtaatacttgctttggtaaaattcatcgatgctcgcaggaattttttcatgttcgatatgaatttcacctgctatatatttatttagaagagttacaaaaccagcaatatctcccggttgatacagatggccattgacatcaggttgaataatgtcagcaggcccggagacacaatcggcactgatacaaggaatcccccagctcaaggcttcaagtagggtcattgggaaaccttcaaaagaactcgtgagcaataacgcactcactttttcaatatcttgctggaccaattcccagggatattgttgccaaccataccagacaattcgatcatcaatatttaattctctaccataagcctggcatttttcgaaatcggagccatcacccaatacatggagtttccagttacctttcgcttgacttaagccatcaagcaggtctttaactcttttctggccttcaaatttcatacgcccaacataaataaacgttgccgtttcaccttcctcgggcgcgggaatgacactgtctttagtttcgacgggattaaaaataacatttatcgtgctttctgctacacctcgattaatcatttgctgtttaatgccagagctgattgctaaatgatagtcggcacaggtgatatattcagcatgttttttgtgatctaaagaaaaatgtggccaactaaatactggcatatcaattccactttttttacgtgcttttgcggcaaacaggcaggagatcacatcaatacaaataacgatatctggttggtactcctgaagccatttacttagagcatgaatatgtttcgcccgacgcaaaaaacctaaacgaatattggaaaaactacaactgtatttaataccttccagccatcccttatccattttgtcattacgacaaaagaaaaacatttcactttggatatgttgttgcctgaaggtagtaataacatcacggatgacagtttccatgccgccaaatccagaaacagcttcgccgataaacgctattttcatagaaactctcattaattgagtaaaactcactgttttaacggttttatttgtctataaaatcagaaacaatcgtactcatcattttatctggactgaatttatataaactatcataatccattggtttaacagaactgttaataaaatactctaacttatcccaatcatcatgacctattataaaaaagcgagattcactatagatttcactaccaaatacatttatattattagtaattaattttttattgaaaaatagtgcctcaagtatacgaagagtccagccagattggttttctttggttatatcaacaattatattagcatttaatgttcttctaatattctcttcataagatatttgtttttcaatcaaatacttactagtcgtagaacttgtcttatctttgacaacattaaaatctagcttacatcctagtgttgttaatctctcggctaactcattaattatttgaagacgccctttatcacgaccaaggaaaaaacatattggctggctgttatttttgtcagataaactataatttctaatttcatccattcctataggaaaaaattgttctattgccttgatcttttcattccctataaatctatgctcaaaatcatatataatatcgaaataattcgcgttatcaagaataaaatcttcgccaacagtatttcttagaagcaaaactttatgacagttaatattttttaatatttgtttattgatacctttattaacaacactgtcattaatgataattatgtcatcttttttaatatcattgaggtaatgcttgatgaataatcgccccagccatgcattatccatccctattttacttatttttttattaatccagttatatttttttggtgttgttatattttttatcttgtacttttttttcaggtactgaatcatttttaattcataatctgcaacccaatttataaaataaatagtcataataaagttagttccagtacatactaataaatatttttataatcctttgcgttgtgttcgctctttaatacgctcggccttaacgcttgccatgttcaataaattctgttcaagagacaatattttgcgtaaaggcatcccaaaataaaccttcataaatcgccagatatctctttgcgtcaggccaatattcatactactgaaatataaaccaatcaggtctttatcgcgccagcggcgcggtacttttgcacgtatctgtgcccgatgcagatcgataacactaatttttaattcatcttcccggccagtaaatggcaaatgaagcaaaaagtggcaaatgtaacagtcgcggtgatttatccctgcagtatgcattttacgcaccatagttgctacacgtgcgatcagcatacgcttaacacgtatatcaggcgggttgactgcccaatcggcacaataatcttcaaggctaattgtgggagtgagatcttcggtaataataaaacttgcgcgagttaatggatttaaccctttttcgccaaacccaatgcccttcattgtatcaacgccaacatcactcaggcgatgaatagcgtgccactctctgtctgcgcccaaaacgggcatccgcaaactgagtagattttttataatctcttttaatgtcgtccccttgtgccatttaagaaaatagcttttcccggacagttcaaagcgtaatgtacgacgagtctccagttcacgaaagacctcgccgttcagttttttgacctctgcaaaagcatctttaccacgccaaagtgtggcaagcggctcttttaattcaaccatctaaaccacctgtaatgatatccgcggctttttctggcaagctatacaaatcctgagtatcggcataatggcgagcattctccgcccaggccattcgcaatgggctctgagttaacgctttacgtaaaacttcatttaattgttcctgagagaaaggttcagcgatgaccgttccacaattggcatccgcaatataatgcgcgtacccacataccgctgttgttaaaacaggtaacccagcagtgatcgcttctagaagaacgatacccgcggcttcctgataagcgggatgcagtaataaatcagcggctgccattaattcactcacatcattgcgaccggagaagaaatgcacattgctccgcacgccgagtttttctgccagcgcttcaaattttcgcggcttatcctgaccaacaacaaataaaagcgtattgtgacgtaaactttccggtaagcttgccaaagcttcaatactgcgatctacacctttacggccaaaatcacttccaacctgcagtaataagttttgttgctcttttatgccatttttctggcgataaatttcacggctgtttgggatttgctcactgtattttctgtccggataaataccgggaggaagaatttgaaaacgttcaggttcagtttgataatgcttctggaaatcggcgatttgcttatcggtcagcatcataagtttcgtgcttttaccctgctcgaaagtcgctcgctcaaatgcggcataatggcgatatcgacttgttaaacgatataaaaaacctttttcttgcgcaactttctcggcgtaacaaacatcagcggcaaaataaacatccaggccaggcatcttattaaacccaacaacgcgatctgcgggatgctctttgagatgattttgtacccaggcataatattctgcattgcgtccatggttggtatgggacttaactggcacctgaataagctcaaatgctttcgggcaatcgccttcccagctctgtgtatatacccgaacatggtggccccgtgcggcaactgtacttgcaatgcgcataaagtcacgttgaagcccaccaaatggaaaatatttatataaacaaaacgccacgatcataattgtgcattcctgtcagcactaggggcatcttctggcaacagcttttccgtagcggcgatcacatcctccgctgggataacagaaagatattttttgttgcggtcaagttcatgccgggtcggcattttctgataattccccgcccagaattgaataatattctcggtccagggacgccagaatacgtgatccgttgcaccaaatagactaatgactggcgttttcactgccgctgcaatatgtcccggcgcagaatccacaccaataaaaagcactgcatgatcaattaatgcacccagttcaggaaaacgtgttttacctgcaaggccagtaatgggttttgtttcgcaacctcgtgcaatctcatctacacaagcgagatcatctgcgctgggcccacaggttagcacaacctgatagcctcgctgttgcagcgcatcgataaccttagaaaatttatcgttatcccaacacttaaatatctgacgcgctgtcggttggatgacaacataatgatcttttacgcccagggcatctaattcccggcgcatcttcttccagcaatcttcggcgtaactcattgttgtgtcggtgtagaaatcggtaatacctaatggctcaaggacgcttaaattacgctcaacaatatgtgtaccgtgtattggcgctaagtgtgtgaagctttttttccaaataccatgctgccgatgaccataaagttggcttattttcatccgtgcaggtaaacaacgtaccagcagcgccaccatccactgatccgtaagattaatgaccaggtcataattattcgcacgcagagtttttatcaagctaagcacatttttaattttatcgaaagttcccgcacctttattgcttatcccatagagcgcattaatttccgggttttcagacaaaatagggatggtgtcctgataaagcagcatatcgatttttgcatcaggataattctgcttgagcgtactgatgacaggagtagttaataacatatccccatgatatcgcatctttatgaccaggatttttcgaaatggcttttccactagcgactcttttgtgtgattgtctggttaagttaagcagaaaaaagcacgctaccgccccaggctcaacagctacctgaatactgataacgcacttactttgacgtgctagtgtatcatttctttcgcagcaatccgacccgaatgatttttatacacaaaatatactttaatcataaaaatcaaatagataaaaaatagcatttcgataatgtcagtacggcctatgtagatttgaaaatggggccgagtttcaatgaatcgcataaaaatacaaaaaaaatgaagatgtagcggcagatcagaccaaactgaagctatttaagtcaaaaacgggaaaagtaatggtaaagccacagctaaatacatagaatccccagcacatccataagtcagctatttactatgctcgaattgctttacaccgcccttctctaccttattcagccgctgatctggatacggctctgggtgcgcggacgtaaggctccggcctatcgaaaacgctggggtgaacgttacggtttttaccgccatccgctaaaaccaggcggcattatgctgcactccgtctccgtcggtgaaactctggcggcaatcccgttggtgcgcgcgctgcgtcatcgttatcctgatttaccgattaccgtaacaaccatgacgccaaccggtagcgagcgcgtacaaagcgctttcgggaaggatgttcagcacgtttatctgccgtatgatctgcccgatgcactcaaccgtttcctgaataaagtcgaccctaaactggtgttgattatggaaaccgaactatggcctaacctgattgcggcgctacataaacgtaaaattccgctggtgatcgctaacgcgcgactctctgcccgcagcgccgcaggttatgccaaactgggtaaattcgtccgtcgcttgctgcgtcgtattacgctgattgctgcgcaaaatgaagaagatggtgcacgttttgtggcgctgggcgcaaaaaataatcaggtgaccgttaccggtagcctgaaattcgatatttctgtaacgccgcagttggctgctaaagccgtgacgctgcgccgccagtgggcaccacaccgcccggtatggattgccaccagcactcacgaaggcgaagagagtgtggtgatcgccgcacatcaggcattgttacagcaattcccgaatttattgctcatcctggtaccccgtcatccggaacgcttcccggatgcgattaaccttgtccgccaggctggactaagctatatcacacgctctagtggggaagtcccctccaccagcacgcaggttgtggttggcgatacgatgggcgagttgatgttactgtatggcattgccgatctcgcctttgttggcggtagtctggttgaacgtggtgggcataatccgctggaagctgccgcacacgctattccggtattgatggggccgcatacttttaactttaaagacatttgcgcgcggctggagcaggcaagcgggctgattaccgttaccgatgccactacgcttgcaaaagaggtttcctctttactcaccgacgccgattaccgtagtttctatggccgtcatgccgttgaagtactgtatcaaaaccagggcgcgctacagcgtctgcttcaactgctggaaccttacctgccaccgaaaacgcattgaggttgttatgcaaaaacgggcgatttatccgggtactttcgatcccattaccaatggtcatatcgatatcgtgacgcgcgccacgcagatgttcgatcacgttattctggcgattgccgccagccccagtaaaaaaccgatgtttaccctggaagagcgtgtggcactggcacagcaggcaaccgcgcatctggggaacgtggaagtggtcgggtttagtgatttaatggcgaacttcgcccgtaatcaacacgctacggtgctgattcgtggcctgcgtgcggtggcagattttgaatatgaaatgcagctggcgcatatgaatcgccacttaatgccggaactggaaagtgtgtttctgatgccgagcaaagagtggagctttatctctagtagcttggtgaaagaggtggcgcgccatcagggcgatgtcacccatttcctgccggagaatgtccatcaggcgctgatggcgaagttagcgtaacgtttatgccggatggtatgccatccggcgcgcatgaattacttctggcactgccgacaataaaacgttgcccgctgcgcatgtttagtcgccacaatcggcgtaccgcacacccgacacggctcaccttttcgcccgtaaacctgcaattcctgagcgaaatagcccggtttaccatcactttgcagaaaatctttcagcgttgtaccaccctgctcaatgctacgcagcaacaccgctttaatcacccgagctaacaattcacactctgccaggctcagactactcgccagccgatccggatggatccccgccgcaaacagactttcgctggcatagatattccctacccctaccaccagcttgttatccatcagccacggtttaatcgccgtttttttcttcgcgcacttctgatgcagatactcaccattgaaatcgtcgctaagcggctccggtccaagatgggtcagcacattatgcccttccagctctttggtccacagccaggcaccaaagcggcgcggatcggtgtagcgcagcactttgccgttgctcatcaccaaatccacatggtcatgcttttcagggggaagttcttctggaaggatgcgcaggctgccagacatccctaaatgaatgataatccagccctcaggcagctccagcagcagatatttagcccgccgctgcacgctaagcactggttggtcgcttaaacggtagatctcttcactaaccggccagcgcaagcgtccgttgcgcaccactgcatgaagaatggttgcaccaacgagatgcggttctatgccgcggcggctggtttcaacttcgggtaattcaggcatagcatctccaggaatgaacagatgcagtcaatatgggggcaagcagataacaaaaaaccccgccggagcgaggttttttgttacatcaaagcgagaattatttgattttcgcttctttgtagatcacgtgctggcgaacaactggatcgaattttttcagttccagtttttccggcttagtacgtttgttcttcgtagtggtatagaagtgaccagtaccagcagaagaaaccagcttgattttctcacgaatacctttagccatgatttatttcctctaagtacttagtacttttcgccacgggcacgcagttcagccagaactgtatcgatgccttttttatcgattacacgcatacctttagcagatacgcgcagggtgacaaaacgcttctcgctctcaacccagaaacggtgagagtgcaggttcggcaggaaacggcgtttagtcgcgttcagtgcgtgggaacggttgttaccggtcaccggacgcttgccagtaacttggcagactcgggacatgtctattctccaaaaatcaaattagctcgagcttcgtatggggtattggcgcctcgtcaggctttacagcccggtcatcgcagttctatgtgaactctcgattgccaggcccaaatgccaaacccgagattctcaaaggtggcgtagtatacgctgactcagcgatgtgctcaagtcccgaacagacaaagatcccgaaggatcgcgcatagcgggttaaatccagccgcgttcggcaaaagaaacatactctccacgcccaatcacgatatggtcgagcacgcgtaaatccatgaactgacaactctttattatccgttcagtaatgagtttatccgctttactgggttcagcacaaccgctagggtgattatgtgcaaggatcagcgcgctggcgtttatttttatcgcttcgcggataatttcccgaggatggacttcaacatggtttagcgtgccggaaaaaagacgcctatgcgttataacccggtgttgggagtcgagaaagatcaccataaagatctcccgctcctcacccgtgagctggctttgtaaaaattccctcgtcatctccgggctgagtaaagggctttcttcacgcatccgcacgttgtagtaacgccgcgccagttcagcaatcccctttaactgggcaaatttcgccacgccaattccatgaacgccactaaattgttcatattcagaggttaacaagccataaagagagccgaaattctccagcatctcttttgccagggttaatacatctttaccgcgcgttccggtacgcagaaatagcgccagcagctcgacatccgttaaggcgctaataccaaacttcagcattttttcgcgcggcatcaacagctgactattgtttttcaccttcacctcctttgtggtgctcgcatcctgtcatagccgtttcgttaaatcgacggccagttttcaatcctggaaagcgcctcgcaaagtgaatctcaggtgaaggcacgacaacaaaagtattgtgataaaatcgccaacttctggtgtcaccctacaggaaaaatcatcatgagcctggccggtaaaaaaatcgttctcggcgttagcggcggtattgctgcctataaaacccctgaactggtgcgtcgtttgcgcgatcgcggggccgacgtccgcgtagccatgaccgaagcggcaaaagcctttatcaccccacttagcttgcaggcggtttctggttatcccgtttccgacagtctgctggacccggcagccgaagccgctatgggccatattgagctgggtaaatgggctgatttagtgattctcgcccctgccacggcagatttgattgcccgtgttgctgccggaatggcgaatgacctggtaagcacgatttgtctggctacacctgcgcctgtagccgtgctccccgccatgaaccagcagatgtaccgtgccgctgccacgcagcataatttagaggtgcttgcttcccgtggtttgctcatctgggggccagacagtggcagtcaggcttgtggtgatatcggtcctgggcgaatgctcgatccgttaaccattgtggatatggcggtagcgcattttagccccgtcaacgacctgaaacatctgaacattatgattaccgccggcccgacgcgtgaaccgctcgatccggtgcgttatatctctaatcacagctccggcaagatgggttttgctatcgccgccgccgctgcccgtcgtggcgcgaacgtcacgctggtaagtggtccggttagtctaccgacgccaccgtttgttaaacgtgttgatgtgatgaccgcgctggaaatggaagccgccgtgaatgcttctgtacagcagcaaaatatttttatcggctgcgccgccgtggcggattatcgcgcagctaccgtggccccagagaaaatcaaaaagcaggccacgcagggtgatgaattaacaataaaaatggttaaaaaccccgatatcgtcgcaggcgttgccgcactaaaagaccatcgaccctacgtcgttggatttgccgccgaaacaaataatgtggaagaatacgcccggcaaaaacgtatccgtaaaaaccttgatctgatctgcgcgaacgatgtttcccagccaactcaaggatttaacagcgacaacaacgcattacaccttttctggcaggacggagataaagtcttaccgcttgagcgcaaagagctccttggccaattattactcgacgagatcgtgacccgttatgatgaaaaaaatcgacgttaagattctggacccgcgcgttgggaaggaatttccgctcccgacttatgccacctctggctctgccggacttgacctgcgtgcctgtctcaacgacgccgtagaactggctccgggtgacactacgctggttccgaccgggctggcgattcatattgccgatcctagtctggcggcaatgatgctgccgcgctccggattgggacataagcacggtatcgtgcttggtaacctggtaggattgatcgattctgactatcagggccagttgatgatttccgtgtggaaccgtggtcaggacagcttcaccattcaacctggcgaacgcatcgcccagatgatttttgttccggtagtacaggctgaatttaatctggtggaagatttcgacgccaccgaccgcggtgaaggcggctttggtcactctggtcgtcagtaacacatacgcatccgaataacgtcataacatagccgcaaacatttcgtttgcggtcatagcgtgggtgccgcctggcaagtgcttattttcaggggtattttgtaacatggcagaaaaacaaactgcgaaaaggaaccgtcgcgaggaaatacttcagtctctggcgctgatgctggaatccagcgatggaagccaacgtatcacgacggcaaaactggccgcctctgtcggcgtttccgaagcggcactgtatcgccacttccccagtaagacccgcatgttcgatagcctgattgagtttatcgaagatagcctgattactcgcatcaacctgattctgaaagatgagaaagacaccacagcgcgcctgcgtctgattgtgttgctgcttctcggttttggtgagcgtaatcctggcctgacccgcatcctcactggtcatgcgctaatgtttgaacaggatcgcctgcaagggcgcatcaaccagctgttcgagcgtattgaagcgcagctgcgccaggtattgcgtgaaaagagaatgcgtgagggtgaaggttacaccaccgatgaaaccctgctggcaagccagatcctggccttctgtgaaggtatgctgagtcgttttgtccgcagcgaatttaaataccgcccgacggatgattttgacgcccgctggccgctaattgcggcacagttgcagtaatatgacgccggatgacttttcatccggcgagtttctttaaacgccaaactcttcgcgataggccttaaccgccgccagatgttccgccatttccggcttctcttccaggtaagcaatcaggtctttcagggtgatgatagagatcactttgcagttgtaatcacgctcaacttcctgaatcgcgctaatctcgccgcgcccgcgttcctgacgatcgaggctaatcaacacgccagcaagcgtcgcgccattggcctgaataatctccatgctctcgcgaatcgccgttccggcggtgatcacatcatctaccagcattacgcgtccttgtaacgcgctaccaaccagattgccgccttcaccgtggtcttttgcttctttgcggttaaagcagtacggcaggtccaggtcgtgatgctccgccagtgccacagcggttgtggtggcaatcgggatccctttgtaagcagggccaaacagcagatcgaactcaatgccggaatccaccaacgcttcagcgtaaaaacggcctaacagtgccagatcgcgcccggtattaaacagcccggcgttgaagaaataggggcttttgcgcccggatttcagcgtaaactcgccaaactttaacacctgcttgctaagcgcaaattcaataaactggcgctgatatggtttcatgccttcgctcctcatcttacttttctacagacaaaaaaaaggcgactcatcagtcgccttaaaaatcagtttgccagcgccgccttctgcgtcgttacaatggattgctttcccctcgggccagagccaacaagatgagtagctcttcatgggtgaacggctcgccttctgccgtcccctgcacttcaatgatgcgcccgtcttcggtcatcactacgttcatgtcggtctctgcggcagagtcttcaacgtattccagatcgcaaaccgcttcgccgttcacaattccgacagaaactgcggctaccatccctttcatcggattggttttcagcttgccgttttccaccagcttctgtagcgcatctaccagcgccacgcaggcacccgtaatgctcgcggtacgcgtgccaccatcagcctgaagcacgtcgcagtccagcgtaatggtgaactcacccagcgctttcaaatctactgccgcgcgaagagcacgggcgatcagacgctggatttccattgtgcgtccaccctgcttacctttcgccgcttcacgagcgttacgggtgtgggtagaacgtggcagcatgccgtactctgcggtgatccagccctggccctgacctttcaggaagcgcggcacgccttcttcaatagaggcggtacacaacactttggtatcgccaaattcgaccagcacgctgccttctgcatgttttgtatagttacgagtcagggtaacgggacgcacctgattattgctacggcctgctggacgcatattgaaatctccggcttgaaacaaatgtggctgcgcattatacggacttccggcggttattcctatcctgacaaggcatcgatggctataatccttccacctctccttttataaacaggaacgtctatgatccgcagtatgaccgcctacgcccggcgtgaaatcaagggtgaatgggggagcgcaacctgggaaatgcgcagcgtaaaccagcgttatctggaaacttactttcgtctgccggagcagttccgtagccttgaacctgtcgttcgcgagcgtattcgttctcgcctgacgcgcggtaaagtggaatgtaccctgcgctatgagccagatgttagcgcgcaaggtgagctgatcctcaacgaaaaactggctaaacagctggtaactgccgcgaactgggtaaaaatgcagagtgacgaaggggaaatcaacccggttgatattctacgctggccgggcgtgatggcagcccaggagcaggatcttgacgccattgccgctgaaattctcgcggcgctggatggtacgctggacgactttattgtcgcgcgcgaaaccgaaggtcaggcactgaaagcattgatcgagcagcgtctggaaggcgtcaccgccgaagtggtcaaagtccgctcccatatgccggaaatcctgcaatggcagcgtgagcgtctggtcgcgaagctggaagatgctcaggtgcaactggaaaacaaccgtctggagcaggaactggttctgctggcacaacgaattgacgttgccgaagaactggatcgcctcgaagcgcatgtcaaagagacctacaacattctgaagaaaaaagaagcggttggtcgtcgtctggattttatgatgcaggagttcaaccgcgagagcaacactcttgcgagcaagtctatcaatgccgaagtgacaaactccgccatcgagctgaaagtgttgattgagcagatgcgcgagcagattcagaacatcgaataactcgtaacgccaattcttacttttccgccttcacaaatgccgccactcaaacagagcggcatttttcttccccgcaacattcaattctgttttgcgtgcctgctccagattttgcgatgtttttttgcccagcacactgagaacgtgagatactcacaactgtatataaatacagttacagatttactttctttgcaattgatatcacatggagtgggcaatgaacgaacatcatcaaccttttgaagagataaaactgattaatgcaaacggagcagaacaatggagtgcaagacaacttgggaaactactgggttatagtgagtatcgtcactttatacctgtattaacgcgcgccaaagaagcctgtgagaacagtggtcacacaattgatgaccatttcgaggagatcctcgatatggtcaaaattggcagtaatgccaaaagagcattaaaagacatcgtactctcccgctatgcctgttacctggtagtacaaaacggcgaccctgcgaaaccggtcattgcggcagggcagacttattttgctatccagacccgacggcaggagcttgctgacgatgaagcatttaagcaacttcgtgaagacgaaaagcgtctgtttctgagaaatgagttgaaagaacataacaaacaattggttgaggcagcacagcaagctggggtagcgacagctactgatttcgccatatttcagaatcatggttaccaggggctgtatggtggattagatcagaaagctattcatcagcggaaggggctgaaaaagaatcagaagatcctggatcatatgggtagtacagaactggcggctaatctctttcgagctacccaaacagaagaaaaactcaagcgggatggcgtgaatagtaaacagcaagcaaacaccacacactttgacgtgggtcgcaaggtgaggcaaaccattcaggaacttggcggaaccatgcctgaggagttgccgaccccgcaggtcagcatcaagcagttggaaaacagtgtaaaaattacagagaagaaataacagaaactaaaaactctttttgttgattgagacacccgatgcgtaagccaaggtccaggtgcagtgaacacaatggctaaatattgcacctttcttttccccctcagttttaacctattttttcttatgcattttctcagacaagaagtcagaagaatgcatctctgctacagaaaatagcgatttcacataactacaagttatcaatttcccctccccttaaaaaatctcaatcgtgacaatgcgcacaaatcgctaccctgccagacagatttttagggagagaaccatgctgttacacattttgtatttggttggcattactgccgaagccatgacgggggcgctggcggccggacgacggcgcatggatacatttggcgtaattattattgcgaccgccaccgcaattggcggagggagtgtgcgcgatattctgctgggccactatccgctcggctgggtcaaacacccggaatatgtgattatcgtcgctaccgccgcagtactcaccactatcgttgctcctgtaatgccttacctgcgcaaagtgtttctggtgctcgatgcgctcggactggtggtcttttctatcatcggggcacaggttgcactggatatggggcacggcccaattattgccgttgtcgcggcggtaaccaccggcgtgtttggcggcgttttgcgcgatatgttctgtaaacgtatcccactggtattccagaaagagttgtatgccggtgtcagttttgcctccgccgtgctgtacatcgcgctgcaacactatgtttctaaccatgatgtggtaattatctccaccctggtattcggcttttttgcccgcttactggcgctacgccttaagctgggattaccggtcttttactacagccacgaaggacattaaggttcaaaacctgtgatctgctgggcagccagccaactgcccagcttcttgatttgcgcattttccttccattcaataacctgtctggcgcgtccgcttccagtccccggcagctgctgccagaactgctccgtgctaaataaaagttggctccaggaccgttcatcactggcattaagcgccgcccgggttagcggtattcccattgccatcacccagcgagtaaaaggctgcttacgagccagattaaactgatgccatagctgcgcacttttacttttcgcgatccccggcgtgttctgtaattgctctggcgttaataaaagccaggaaaagatatgttcaaagcgatgagtctgatgcagcgcgcgccaaccggcctcaccaatgccatccagcccaagaacctgttttgcccccagccagactaagcgactaatgaactgttcctgacaaacatcagaagcaaagtagcaggtcaagctgttaaagcggttttctggcggtgtcggttttgtacgttctgcaccgcgccacaccacatcatcaatgcgaggaataccctgaccggcaaggctgacgagaatctgatcaccaggcgcaatatcccactcctgccagcgcctgacggaaccaatattcacccgctggacttttttatcatccagcatgacaggtgcgagactcgcaaccacgcttattttaccgctcttacccaccgcaaactgaattgccttcacttcggcaacctgagctacaggttgatatttccaggccaccagccactctgcctggcccggtagccaatggcgggattctggctctttcgccgctcgtacaactacgccatcggtgacgaagggtaattccgctttccaccactcattgcgtacgcgcgcaacttcatcagcatttttcaccgcacgggtatacgtctgcgttagagtaaaacctgcggtagccagctcttttaaacgatcagacattaactgcggtccatccggccatgcccagacaaaaacgcccagagaattcagcgtgtcgctatcgtcctggcgcatcatcaagccagcaacttttgcgcgggcatttattccccccatttgttgttggatatgcccctcgcgctggagaaatatttccccctgaagcgtactgttggctaaaggcccgctaacggtttgcggcacagcggaaattaagctaactttctgcgtccagtcctcgcctttcaggccattaccgcgactgattgctttgttcagtttcccgtcccgataaaccagggttaccgcaacgccatcaacttttggctgcacccaaagatcgctacgttctcgcatccacagacttaatgcgtttttatccaccattttgcgtacacccgtatgggcaaccggatgcataaccgcaccatttaaaggcggcatcatcacgtcgcggggctcgctcccaaagcagcgttgccactgcgtaagacgggcgcttaactgatcgtaaacaccgtcttccacctcactttttccttccttccagtagtcatcgtcccactgttttatttgctgttgcaggcgggaaatttcttcctgtgctctggctgggctccaggccggacagaccgcccacacagaactttgccagcacaagatacctattaatatcgccatccatactttcatcatcacctccgctgtagatagtcaggcagatatacaacgtgatgaaagcaaagccgagtggcaaaaacggagtctgcgaggacgcttcctgaaaatcgtctttattgcagtgaatgacaggcaaatgcggaagcagctacgcaaaacgcaacaactttgcgcaaaaagtgtgagcaagggctacgtcacatggccgcgccgtgtataataagctcgtatgtaggctttatttcgctaatcacatacgaaagatactcatggctcaaggcacgctttatattgtttccgcccccagtggcgcgggtaaatccagcctgattcaggctttattaaaaacccaaccgttgtgtgacacccaggtttctgttagtcacaccacacgccaaccgcgtcctggtgaagtccacggtgaacattatttctttgttaatcatgatgaatttaaagaaatgattagcagagatgcgttcctcgaacacgcagaagtttttggtaattactatggcactagccgtgaggccattgagcaagtactggcgaccggtgtcgatgtttttctcgatatcgactggcagggcgcgcagcaaattcgccagaagatgccgcacgcgcggagtatctttattttaccgccgtccaaaattgaactggaccgccgtctacgcggtcgcggtcaggacagcgaagaggtcattgcaaagcgtatggcgcaagctgttgcagaaatgagccattacgccgaatatgattatctgattgtgaatgatgacttcgataccgcgttgaccgatttgaagaccattattcgcgccgaacgtctgcgcatgagccgccaaaagcagcgtcatgacgctttaatcagcaaattgttggcagactgaacctgatttcagtatcatgcccagtcatttcttcacctgtggagctttttaagtatggcacgcgtaactgttcaggacgctgtagagaaaattggtaaccgttttgacctggtactggtcgccgcgcgtcgcgctcgtcagatgcaggtaggcggaaaggatccgctggtaccggaagaaaacgataaaaccactgtaatcgcgctgcgcgaaatcgaagaaggtctgatcaacaaccagatcctcgacgttcgcgaacgccaggaacagcaagagcaggaagccgctgaattacaagccgttaccgctattgctgaaggtcgtcgttaatcacaaagcgggtcgcccttgtatctgtttgaaagcctgaatcaactgattcaaacctacctgccggaagaccaaatcaagcgtctgcggcaggcgtatctcgttgcacgtgatgctcacgaggggcaaacacgtagtagcggtgaaccctatatcacgcacccggtagcggttgcctgcattctggccgagatgaaactcgactatgaaacgctgatggcggcgctgctgcatgacgtgattgaagatactcccgccacctaccaggatatggaacagctttttggtaaaagcgtcgccgagctggtagagggggtgagcaaacttgataaactcaagttccgcgataagaaagaggcgcaggccgaaaactttcgcaagatgattatggcgatggtgcaggatatccgcgtcatcctcatcaaacttgccgaccgtacccacaacatgcgcacgctgggcagtcttcgcccggacaaacgtcgccgcatcgcccgtgaaactctcgaaatttatagcccgctggcgcaccgtttaggtatccaccacattaaaaccgaactcgaagagctgggttttgaggcgctgtatcccaaccgttatcgcgtaatcaaagaagtggtgaaagccgcgcgcggcaaccgtaaagagatgatccagaagattctttctgaaatcgaagggcgtttgcaggaagcgggaataccgtgccgcgtcagtggtcgcgagaagcatctttatagcatttactgcaaaatggtgctcaaagagcagcgttttcacagcatcatggacatctacgctttccgcgtgatcgtcaatgattctgacacctgttatcgcgtgctgggccagatgcacagcctgtacaagccgcgtccgggccgcgtgaaagactatatcgccattccaaaagcgaacggctatcagtctttgcacaccagcatgatcggcccgcacggtgtgccggttgaggtccagatccgtaccgaagatatggaccagatggcggagatgggtgttgccgcgcactgggcttataaagagcacggcgaaaccagtactaccgcacaaatccgcgcccagcgctggatgcaaagcctgctggagctgcaacagagcgccggtagtagctttgaatttatcgagagcgttaaatccgatctcttcccggatgagatttacgttttcacaccggaagggcgcattgtcgagctgcctgccggtgcaacgcccgtcgacttcgcttatgcagtgcataccgatatcggtcatgcctgcgtgggcgcacgcgttgaccgccagccttacccgctgagccagccgcttaccagcggtcaaaccgttgaaatcattaccgctccgggcgctcgcccgaatgccgcttggctgaactttgtcgttagcagcaaagcgcgcgccaaaattcgtcagttgctgaaaaacctcaagcgtgatgattctgtaagcctgggccgtcgtctgctcaaccatgctttgggtggtagccgtaagctgaatgaaatcccgcaggaaaatattcagcgcgagctggatcgcatgaagctggcaacgcttgacgatctgctggcagaaatcggacttggtaacgcaatgagcgtggtggtcgcgaaaaatctgcaacatggggacgcctccattccaccggcaacccaaagccacggacatctgcccattaaaggtgccgatggcgtgctgatcacctttgcgaaatgctgccgccctattcctggcgacccgattatcgcccacgtcagccccggtaaaggtctggtgatccaccatgaatcctgccgtaatatccgtggctaccagaaagagccagagaagtttatggctgtggaatgggataaagagacggcgcaggagttcatcaccgaaatcaaggtggagatgttcaatcatcagggtgcgctggcaaacctgacggcggcaattaacaccacgactagcaatattcaaagtttgaatacggaagagaaagatggtcgcgtctacagcgcctttattcgtctgaccgctcgtgaccgtgtgcatctggcgaatatcatgcgcaaaatccgcgtgatgccagacgtgattaaagtcacccgaaaccgaaattaatgttttatgaacccaacacgttatgcacgcatctgcgaaatgctcgccaggcggcagcctgatctgaccgtctgcatggagcaggtccacaaacctcataacgtttctgcgattattcgtaccgcagatgccgttggcgtacatgaagttcacgccgtctggcctggtagccgcatgcgcaccatggctagcgcagcggcgggtagtaacagctgggtacaggtgaaaacacaccgcaccattggcgatgccgtcgctcatctcaaaggccagggcatgcagattctggcaacccatctttctgataacgctgtcgatttccgcgaaattgattacactcgcccgacctgcattttgatgggacaggagaaaacgggcatcacgcaggaagcattggccctggcggatcaggacatcatcattccgatgatcggcatggtgcagagcctgaatgtttccgttgccagtgccctcattctttacgaagcccagcgtcagcggcaaaatgcaggcatgtacctgcgtgaaaacagcatgttgccggaagcagagcaacaacgcctgttgtttgaaggcggctatccggtgctggcgaaagtcgcaaaacgcaaaggcctgccttatccccacgtcaatcagcaaggcgagatcgaagctgatgccgactggtgggctactatgcaggctgcagggtaagtgccatgaaaggtcgcctgttagatgctgtcccactcagttccctaacgggcgttggcgcagcacttagtaacaaactggcgaaaatcaacctgcataccgtgcaggatctactcttacaccttcccctgcgctacgaagatcgcacccatctctaccccatcggagaactactgccgggcgtttatgccacggtggaaggcgaagtgctgaactgcaatatctccttcggcggtcggcggatgatgacctgccagatcagcgacggttccggcatcctcaccatgcgctttttcaatttcagcgcggcaatgaaaaatagcctggcggcgggccgccgtgtactggcttatggcgaagcaaagcgcggtaaatatggtgcggagatgatccacccggaataccgcgtgcagggcgatctcagcacgccagaattacaggaaacgctcacgccggtttatccaacaacggaaggcgtaaagcaggccacgctgcgtaaattaaccgaccaggcgctggatctgctcgacacctgcgccattgaagaactcctgccgccggaactgagtcaaggaatgatgacgctaccggaagcgttgcgcactttgcaccgcccgccaccgacgctacagcttagcgatctggaaaccgggcagcatccggcgcaacgtcgtctgattctggaagaactgctggcgcacaacctcagcatgttagccttacgtgccggagcacagcgttttcatgcccagccgctgagcgccaatgacacgctgaaaaataaactcctcgccgccttaccgttcaagccaacgggcgcacaggcacgcgtagtggcggagatcgagcgcgatatggcgctggatgtgccgatgatgcgtctggtgcagggcgatgtaggttccggtaaaacgctggtcgccgccctcgccgcgttgcgtgcgattgcccacggcaaacaggtagcattgatggcaccaaccgaattactcgccgagcagcacgccaataacttccgcaactggtttgcaccgctcggtatcgaagtgggctggctcgccggtaagcagaaaggtaaagcacggctggcacagcaggaagccatcgccagcggtcaggtgcagatgattgtcggtacacacgccatcttccaggaacaggtgcagtttaacggcctggcgctggtgattatcgacgaacagcatcgttttggcgtgcatcagcgtctggcattgtgggagaaaggccagcagcagggcttccatccgcatcagttgatcatgaccgccacgccgatcccccgcacgctggcaatgactgcgtatgccgatctcgataccagcgtgatagatgagctgccgccaggccgcacgccagtgactacggtcgctattcctgatacccgccgtaccgacatcattgaccgcgtgcaccacgcctgcataactgaaggtcgtcaggcatactgggtttgtacgttgattgaagagagcgaattgctggaagcgcaggcggcggaagctacctgggaagagttgaaactggcgctaccagagttgaacgttggcctggtacacgggcggatgaaacctgccgagaaacaggcggtgatggcgagctttaaacaaggtgagctacacctgctggttgccacaaccgttattgaagtcggcgttgatgtgcctaacgccagtctgatgattatcgaaaacccggagcgtctgggtctggcgcagttacaccagctgcgcgggcgcgtaggtcgtggcgcggtggcttctcactgcgtgctgctctacaaaacgccgctttctaaaacggcgcaaattcgcctgcaagtgctgcgcgacagtaacgacggttttgtgattgcgcaaaaagatctggagattcgcggccctggcgaattgttaggcacgcgtcagacgggtaatgctgaatttaaagtggcggatttactgcgcgatcaggcgatgatcccggaagttcagcgcctggcacgccatattcacgaacgttacccacaacaggcaaaagccctgatagaacgctggatgccggagacggaacgttacagcaatgcgtaaaaggcggcagtgagaagaccgccatttcaggttaccctaccttcctgccggatgcgattcatcaccctacaaattcaataaattatgaatcaatacgcaggcttgataagcgaagcgtatcaggcatttgtctttgttgcggcggcacttctaccgccgcttcatcggttaaccggcaaaaatcggcaacatcaaatacaacttaattaccagcgcattgacgatatcgataaagaacgcaccgaccatcggcaccaccaaaaacgccatgtggcccgggccaaagcgttcagtgatcgcctgcatgttggcgattgccgttggcgttgcaccgaggccaaaaccacagtgacccgcagccagcactgccgcatcgtagtttttgcccatcatgcgccaggtaacgaagatggcatacaacgccatgaagatggtctgtaccaccagaatcgccagcatcggcagcgccaggctagccagctcccacagtttcagccccatcaacgccatcgccaggaacaagctcaagcttacgttacccagcacggataccgcacgctcaaagacgcggtaaaagcccattatactcagaccgttgctcagaatcacgccaacaaacagtacacagacgaaggtcggcagttcaaaagcagtgccagccaaaagttgcgcaacaattttccccaccgtcaggcagatagcaatcagcgcgatagtttcaatcagcaccaagctggtgatcatgcgtcccacatccggcttttcaaacgccgtcgggacttcctggtcatccggaataccgttcggcgtggtggagtgtttcaccagatagcgcgccaccggaccgccaatcaagccgcccagcaccagaccgaacgttgcacaggccatcgccacttccgtcgcattggtgaagccataacgttcaatgaacaatttactccacgcagcgcccgtaccgtgaccgccggaaagagtaatagaaccggccaacagccccatcagcggatcaagccctaacaagctagccataccaatgccaatggcattttgcatcaccaacagaccaacaaccacaatcaagaagatgccaaccacacgcccaccggcacgcaaactggcaatgttggcgttcaggccaatggtggcgaagaaagccagcattaacggatcgcgcagggacatatcaaagttgacttcccagcccatgctttttttcagtactagtagcgccagcgccaccaacaaaccacccgcaacaggttccggtatggtgtatttcttcaaaaaggagacggaatggaccaacttacgcccgagcagcaacgtcagcgttgcggcaacaagcgttgctaaagtatcgagatgaaacatagttactcctttgtatccgcatcactctttcatactcgtcatacttcatcgcgcagtggcaacttcatgaactatgacgggtatcgagttatgctttcctgggtcaaattctcagctgttaatgaacaaatggcatggattttaagcagaaaaataccaaaagttatataaaaaagtgcatttatctcatttaaatatttagatgaggatgtggcaaacgtttgcttttctctttcggtcagctaaaatgcccgctttgctaccacgggattgttttcgatgtctgtttccaccctcgagagtgaaaatgcgcaaccggttgcgcagactcaaaacagcgaactgatttaccgtcttgaagatcgtccgccgcttcctcaaaccctgtttgccgcctgtcagcatctgctggcgatgttcgttgcggtgatcacgccagcgctattaatctgccaggcgctgggtttaccggcacaagacacgcaacacattattagtatgagcctgtttgcctccggtgtggcaagcattattcaaattaaggcctggggtccggttggctccgggctgttgtctattcagggcaccagcttcaactttgttgccccgctgattatgggcggtaccgcgctgaaaaccggtggtgctgatgttcctaccatgatggcggctttgttcggcacgttgatgctggcaagttgcaccgagatggtgatctcccgcgttctgcatctggcgcgccgcattattacgccgctggtttctggcgttgtggtgatgattatcggcctgagcctaattcaggttgggttaacgtccattggcggcggttacgcagccatgagcgataacaccttcggcgcaccgaaaaatctgctgctggcaggcgtggtcttagccttaattatcctgcttaaccgtcaacgtaacccttacttacgcgtggccagtctggtaattgcgatggcggccggatatgcgctggcgtggtttatgggcatgttgccagaaagcaacgaacctatgacgcaagaactgattatggtgccaacgccgctctattacggtcttggcattgaatggagtctgctgctgccgctgatgctggtctttatgatcactagcctggaaaccattggcgatatcacggcgacctctgacgtttccgaacagccagtgtccggtccgctgtacatgaaacgcctgaaaggcggcgtgctggcaaacggcctgaacagctttgttagcgcggtgtttaacaccttcccgaactcctgcttcgggcaaaacaacggagtgatccagttgactggtgttgccagccgctatgtcggttttgtcgtcgcgctgatgttgatcgtgctgggtctgttcccggcagtgagcggttttgtacaacacattccagaaccggttctgggcggcgcaacgcttgtaatgtttggcaccatcgccgcctccggtgtgcgtatcgtttctcgtgagccgctgaaccgtcgggcgattctgattatcgcgctgagcctggcggttggtctgggcgtgtctcagcagccgctgattttgcagtttgcccctgaatggctgaaaaacctgctctcctccgggatcgccgcgggcggtattactgccatcgtgctgaatctgattttcccaccagaaaaacagtaattcactggcggcggtaagataattaccgccgcagtctcacctctttaaccattcccgccttgaggattgcgcgtaaatcgtgcataactcccttatgtgcatttcacgggatggaagaccatgaaatttattgggaagctgcttctctacattctcatcgctctgttagtggcgatcgctggcctctattttcttctgcaaacccgctggggagcagaacatatcagcgcatgggtttccgagaatagcgactatcatctggccttcggggcgatggatcaccgtttttccgcgccatctcatatcgtgctggagaacgtcacgtttggtcgtgatggccagcccgcgaccctggtggccaaaagtgtcgacattgcgctaagcagtcggcaactgaccgaaccacgccatgtcgataccatcctgctggaaaacgggacgctgaatctcaccgaccagaccgcgccgctaccgttcaaagccgatcgtctgcaactgcgtgatatggcgtttaatagcccgaatagcgaatggaaactgagcgcgcagcgggtaaatggcggcgtagttccgtggagtccaaaagccggtaaagtgctgggtacgaaggcgcagattcagtttagtgccggaagccttagcctcaatgatgttcctgccaccaatgtactgattgaaggcagtattgataacgatcgcgttacgctgactaacctgggtgccgacatcgcccgcgggacattaaccggaaacgcgcagcgtaacgccgacggcagctggcaagtggaaaacctgcgcatggcggatatacgtctacaaagcgaaaaaagcctaaccgacttctttgcgccattacgctctgtcccgagcttgcagattggtcgcctggaagtgatcgatgctcgtttgcaaggtccggactgggcggtgaccgacctcgatctcagcttgcgcaacatgaccttcagtaaagatgactggcagacacaggaaggcaaactgagcatgaacgctagcgagttcatttatggtagcctgcatttatttgacccgattataaacacggaattttccccgcagggcgtagcgctgcgccagttcaccagccgctgggaagggggtatggtcagaacgagtgggaactggctgcgtgacgggaaaacgttgatccttgatgatgcggcaattgccgggctggaatataccttgccgaaaaactggcaacagttgtggatggaaacgacacccggttggttaaacagcctgcaactgaagagatttagcgccagccgcaatctgatcattgatatcgaccctgacttcccgtggcagctcaccgcgctcgatggttacggtgccaacctgacgctggttaccgatcataaatggggcgtctggagtggcagcgcgaatctgaatgccgccgccgcgacattcaatcgtgttgatgttcgtcgcccgagcctggcgctgaccgccaacagcagcacggtgaatatcagcgaactgagtgcatttactgaaaaaggcattctggaagccaccgccagtgttagtcaaacgccacaacgtcagacacatatcagcctgaatggacgcggtgtgccggtgaatattttgcaacagtggggatggcctgaattaccgttgactggcgacggcaatattcagcttaccgccagtggcgatattcaggccaatgtcccgttgaaacctacggttagcgggcaattgcatgccgtgaacgccgcaaagcagcaagtgactcaaaccatgaatgctggcatcgtttccagcggtgaagttacaagcacggagccggtgcggtaaacatcaatctcgccgggtacgactcagacgtacccggcattccatcaatagattacaacgtaattgtcagcgcattcccttgaggcttcaccaccagcccctgctcactttcagcctggctaccgtcttgcagaccatttactttcacaacattgcgcaggcacagtgtccagttcttcgcctcgcccgcaccagtcacagtaatcgtgttgccagtacgtgctgcttttaaagtaaagatcacgcttccgtcagcagcgggcacttcacagacggcttcatgcccgtcttgcagattgaagaggtggaatgccgtgccttcgtgccacacgtaatcgggacgttgatcgttgttgcccagcgccagtagagtgttatcacgcacataaacgggcagactcaggaagccgtgctgctgtttatgccagcgactaccgtcgagttcatcgttgtgccacaggtgtgtccagcgaccttccggcaggtagaactgcacatcgcccgcttcagtgaacaccggcgcaaccatcacgttgtcgcctaacatgtattgacggtcaaggtaatcacaagccggatcgtccgggaactccatcatcatggcccgcatcatcggcgtaccccgcgcgttcgcacgcgcagcttcacgatacagatacggcatcatgcggcatttcagttgcgtgaagaagcgcaccacatcacaggactcatcatcgtaggcccacggcacacgataagatttgctaccgtgtaaacggctatggctggagagcaaaccaaacgcgcaccagcgtttgtaaacgtgcgccggagcggtattttcaaagccgccgatatcgtggctccagaagccaaaaccactaaggccaatagacaaaccaccgcgcaggctttccgccatactttcgtagttagcgtaacaatcgccaccccagtgtaccgggaatttctgcgcaccgacggaggcgctgcgggcaaacaagacagcttcttcctcaccaacggtgtccttgagcacgttccacaccagttcgttgtagatgtacgcataatggttatgcattttctgcggatcggaaccgtcaaaccactgaacatcagttgggatacgttcgccaaagtcggtcttaaagcaatcaacgcccatcgcgaccagacctttcagtttgtcggcgtaccatttgcaggcatccggattggtaaagtcataaatcgccagacctggctgccatttatcccactgccataggctaccgtccgggcgtttgagtaaatagcctttctcttgtaactctttaaagacgggggatttttgaccgatataggggttaatccagacgcagattttcagtcctttcgctttcaggcggcggatcatcccttccgggtcagggaaagtcagcgggtcccactcaaaatcgcaccactggaaggctttcatccagaaacagtcaaagtggaaaacatgcagcggcagattgcgttccgccataccatcgataaagctgtttaccgtcgcttcgtcgtagttggtggtaaaactagtggttagccacaggccgaaggaccacgcgggcggcagcgccggacgaccagtaaagcgggtataacgatcaagtaccgctttcggcgtcgggccgtcgataacaaagtattcgagatattcactctcaacgctgaactgcactttggagactttctcgcttcccacttcaaaagagacacactggggatgattgaccagtaccccataaccacggttagtcatgtagaacgggatatttttatacgcctgttcagtacttgtgccgccgtcccggttccaggtctctaccgtctggccattgcgcaccagggcagtaaagcgctctcccagaccgtaaactgtttcgccaacgccaagatcaagccgctcaaacatataattgcgttgattattcgtgtcctgcacgtagccattatttttcacctgactaccggtaatacgttcgccgttgcgcagaaaatccagactccagaactcacctttgctgacacgcgcgcttaagttgccacttttaaactcagcataacgttctgtgttttcgattgtgaccttcacgtcctgcaaaatattgagcggataatgaggaccgttattcagcgccccctgaaaatgctcaatccgcacaccgacaataccttcctgtggggagaaaaagcgcaacgtaaataaaggcgtatcaagctgccaggtacgttcacgcacatcacggggggcagcatagaccaccatttcattatcctgctgttcaacctcgaacacctgaagcgggtgaatcaaattgaggccaggttgaatcaaccagtttccatcgctaattttcattgccgttccttagttctgcacttcttgagaggtgaattgttgctggcaacggcgtttaccctgagccagctgttccataacggttttcagattgtgcgtcgtgagactgtagtagcgtttagcgataatcgcgctcagcaaataacagatcgccggaacaatcgtgaatagcgcaataatgatgctaatcgtggcgctgttctgcgctttttctgccgcatcatatccgccataagccagcatccagccgataagagcgccgccgaaggccaaccccagtttgagcacaaacagcgtgccagcaaaactgatcccggtcaggcgtttaccattgcaccactcgccgtagtcgacggtatcggacatcattacccactggataggtgtcaccagttgatgcaacacaccaatcacgaagatgaagacaaacatagtgatgctggcctgcatgggaacaaagaacatcgcgaggctaatcactgccagcagggcgttcgtccaccagaagatagtgactttacatttccagtcggtcagaggttttgccagtgcggaaccaatcaggttacccacgcaataagtggtgagaaaagcgacaaacacttccggcgtgcccaaaatccatgtgacgtaatacatcatcgccccaccgcgtacgcacaccgccaggatattgaaaatggttagtaaaccgacaatccgccactggtcgttttgccagatatcacgtaaatcttcccgcatagacgttgttgtaggtggtgcttcaacgcgttctttagtggtgaagaaacaaaatgccagcatcatgaatgccaccacggaaaggaccgcgataccgccctggaaaccgagtggtttattatcaccgccaattaaattaaccagtggcatcatcagaacagtagaaagcatgcctcccgcggtcgccagcacaaaacgccaggattgcaggctgatacgctgagtcgggtcattggtgattacaccacccaatgcgcagtaagggatattgacgacggtataaagtaaggtaagtagggtgtaagtaattgctgcatagatcattttgccgttcatactgagatctggcgtgctataggccagtacacagacgatcccgaatggcagtgcgccaaacagtacccacggacgaaatttaccccagcgagagcgcgttcgatcggccaacaaccccatgcaaggatcggaaatcgcatccagtgcacgagcgaccaaaaacatggttccgacaaaaccggcaggaatgccaaaaatatcggtataaaagaacatcatatataacattacgttatcgaaaataatgtggctggcggcgtctcccatgccataaccaattttctctttaacggacaacacttcactcttcatctgcttttccttgatgctataggggtgctgagaccgataacgcattttgtaaaccatccctgtgagagcgaatattccgatatctggttattaatttatgattcttgttttatgtgatcgtggtagcgttaattccgctcatatatcattgtaaaatatgggttttatatgaactataatgctttcgtgataatacgctgcgtgtattaggcggaaaaaactgatctgggggatgtagaaactcaaggaagtagctataatgcgccccgcctccatgtagcaatcgaggcgcggaagatcgtcgtctccggtgaggcggctggacttcaaatccagttggggccgccagcggtcccgggcaggttcgactcctgtgatcttccgccaaaatgcctctcctgacgttctccaaccccttgtaatactgtcaatccagatattttctactgctcaatattcaatcggcttcaggaatacctggtctaaggttttgtgatggacgatgagcggctgaagaatccgcctgtcggttcttctgtcctcgaacgcatccgcgatattcacgccagtatgcgccgtgtttatttgcaggtgatttgcccccctgctgactctcagccaactgtatcgccattaaggtgaagatgttgttttactcgccccagaacacccttttttatacgactattctatttctttaaccgctggcgaaaaaaactgactataaacttcaccaataatcagactgccatcaagattaatttgttcatttaatatatcaaatcaacttgttttatttttactatcaaaaatagctcattgccttactataattaatatataaattcggtaattaattcttaacatgcttttactaataatctcaattgctggccctataatattgcgctagcattgctttctggttgtatcagcgatactcaaaaattcttaatacaatactcattcgactggtacttatttgtaactcagttatattttttcgcccggtgattcagaagaatgcaaaaaacggctaccactccaagtaaaatacttgatctcactgccgcggcatttttacttgtcgcctttctgacgggtattgcgggcgctcttcagactcctaccctaagtatattcctcgcagatgaactgaaagcccgtcctataatggtaggttttttcttcaccggtagcgctattatgggaattctggtcagtcaatttctggcaaggcactccgataaacaaggcgaccgtaaattactgattctgctatgttgcttatttggagtgctggcctgcacgctttttgcgtggaatcgcaactacttcattctcctcagtacgggcgtacttctgagtagttttgcttccaccgcaaacccgcaaatgttcgccctcgcccgtgaacacgccgacagaacaggccgtgagacggtcatgttcagtacatttttacgtgctcagatcagccttgcctgggttatcgggccaccgctcgcttatgaactggcaatgggatttagttttaaagtgatgtatctcaccgctgccatcgcatttgttgtttgcggactgatagtctggttgtttttgccaagtatacaaagaaatattcctgtcgttacccaacccgtagaaattttaccctccacccacaggaagcgggatacgcggctactttttgtggtctgtagtatgatgtgggcggcgaataatctctacatgataaatatgccgctatttattattgatgaactgcatctaaccgataaactgactggagaaatgattggtatcgctgccggtctggaaattccgatgatgttaatcgcaggctattacatgaaacgtattggcaagcgactattaatgctcattgctatcgtgagtggaatgtgtttttacgccagcgtactcatggcgacgactccggcggttgagctggaattgcaaattcttaatgccatcttccttggtattctctgtggtatcggcatgctttattttcaggacttgatgcctgaaaaaataggctctgcgacaacgttatatgcaaatactagtcgcgtcggctggattatcgccggctctgttgacggaattatggttgaaatctggagctaccatgcgttgttctggctggcgatagggatgttgggtattgcgatgatttgcctgctgtttattaaagatatttaactcaccagtctgggctaagaaaaatcggcgtggcgcaaacagagccatcctcgccatttttgctatcatgcctgcatacataaacgacaaaacagtatgcagagggaaaaatgggttccaccagaaaggggatgctgaacgttctgattgccgccgtgttgtggggaagtagtggggtctgcgcgcaatacatcatggagcaaagccagatgagcagccagtttttgactatgacgcgtttgatattcgccggtttgattctactgacgctgagttttgttcatggcgataaaatcttttctattattaacaatcataaagatgccattagcctgctgattttttccgtggttggcgcgctaactgtacagctcacttttttgctaaccatcgaaaaaagcaacgcagccacggcaacggtgctgcaattcctcagtccgacgattatcgtcgcctggttcagtctggtgcgtaaaagccgcccgggcattctggttttctgcgctattttgacaagcctggtcgggacttttttattggtgacacacggtaatccgacgagtttaagcatctctcctgccgcgttgttctggggcattgccagcgcatttgctgctgcattctataccacctatcccagtacgctaattgcccgctatggcacgttaccagtcgtcggctggagtatgctgattggcggtctgattctgttgcctttttatgccagacaaggaacaaactttgtcgttaacggcagtttgattctggcgtttttttatttggtggtcattggtacgtccctgacatttagtctgtacctgaaaggagcacaattaattggcggtccaaaagccagcattttgagctgtgcagaaccattaagtagcgcgctactctctttgctgttgctggggatcacgttcacattaccggactggctgggaacgctgctgattctgagtagcgtgattttgattagtatggattcccgtcgccgcgccagaaaaataaatcgtccggcgcggcataagtgagaattaccagccaggcaccgcgccaccgttaaaaatggtttctgccgctttagcgacttcgggactttgataagattgcagaaattccttcacgttttctgcattcttattatcttcccgtgccaccaaaatattcacatacgggctattcttatcttcaataaatacgctgtcgtgcaccggagaaagcccggtctgctgaatgtaagtggtgctgataatcgctacatcaactttgggatcatccagtacgcgcgggagctgcgccccctcgagttccataatctgcaaatgacgaggattatcggttatatccagcgcggtaggtaataacccttttccctctttcagagtaattagcttctctttttgcaacagtaaaagtgcgcgaccaaggttggtcgggtcgttggggatcgccactgtcgcgccttcttttatttgcgccacggttttgatttttttggaataacccgccatagggaagacaaacgtatttcccaccgctaccagtttataaccatgcgcctgattatcttgttcaagaaagggtcgatgctggaagacattcgcatcaagttcgccatgatttgtcgcatcgttcggtagcaagctaccgctaaatcctaccagttcaacatcgaggccatatttctcttttgccacctttttagcgacttccgcgacatcttgttctgcgccatttataacgccaactttaatgtgttttgcatcgctgctactctggtcgcaacctgccagcagaattccggccagcaataatgcggcccctgtccgtagatgatgtgttgtcagtttcatttttttatccttttattaatgattacctgactatagcggtaaggtcgctgcggtttaaaaaacgaaacgctatcgataagaataaaaaggaataaaagtggaatataaagtctggcacttcttactgaccacgcaagcgcgtttcgtacagcatgatgagagcgatgaaagcaaactacacttatgcttcattcgatacacatttgtaaaaggttgaatccatgaaaccaacgacactactgcttattttcacttttttcgctatgccaggcatcgtatacgccgagagcccttttagcagtctgcagtccgcaaaagagaaaaccacggtattacaagatttacgtaaaatttgcacgccacaggcgagtttaagtgatgaagcgtgggaaaagttaatgttgagtgatgaaaacaataaacaacatatacgcgaggccatcgtggcgatggaacgtaataatcagagcaattattgggaagcgttgggtaaggtagaatgcccggatatgtaagaacagcaacaactactgaccaacgcttctttacctgatatcaggatttcttcattttcacctttgcagtaaccaacaatgcagtcagcaacatcaatgtgccggacaacatcaacgggctagtcagaccaatattatccagcgcataaccgccgattgccgcgccacaggtattagcaagctgaataaccgccacctgaatagacccggctttttctgcctgatcggccaggctgcgggtgatccacgtactccagccgacgggaaccaatgcaaaagttagcccccagataatcgccacgccggtagcaacgattttatcgcttccccacaacgtcagtaccaacgcactcacagccagtattaacggcgcgcctgctaaggccagttttacgctacgtttaagaatgaagctgctaaggctcgtaccaataaagctggcgataccaaaactcaacagcaccagcgttaagccatccacgccgaatcccgccaggttcatatacaccgggcgaatatacgtgaagaaagcaaactgcccggcgaaagacatgaagatggcgatcatccctgccatcacacccggacgttgtaataagcggaaagtattttgtttctgatggctgggttcgcctggcagactaggcaaacttttgataatccagaaaatacacagcacgcccatcaccgccgccgcattaaagacattgcgccaaccgataagctcgcctaaaaaactgcccaacggcgcggcaatcaccagcgcaatagaaaccgcgccgaagatcacgctcagcgccttcggcaccgtacgcggcggcaccagacgcatggtcaggctcgcgctcatcgcccagaacccgcccagcgccagccccagacaggcacgaccgattaaaagcaaactgaaactgttagcaaaggaaaccagcaagcaggagagcgtcagcaaaacggcaaacaaaataacaacgtagcggcggtcagtagcctgaattgtctgggtaataaacaaactggcaaacattgccacaaaggcggtcacggtcacgctttgcccggcaaccccttcgctaatgcctaaatcctgggccattggcgtcaacaaactgacgggcaaaaactcaacgataatcagacaggcgacacaaaacgccacgctgaaaacggcactccagttcggtcgggtgatggcatccgcgccgcggttttcggcaataaattcactcatggtgttacccgtggcatgtttcaggggaaaagcgctccactttaacatactaatgtgactcgcatttaacgtttttgcaacttttacggtgttgctactgctggagttaagatcgaaacggaacagggcaaagattaccggatgcggcgtgaacgtcttatccacccgacaggtcaggcgcggtctgtaggctgataagacgaaacggtttcaatgcaaccagtgaacgccctcggcaggctgaaagaacgcgttatagcgcatctgaaaagcattaatatcctgcatttcaggttcggtttcgcgcagaaaacctagcgccagcctgacctgagcgtcggtaatcggcgcggcgaggcgagctttttgtaaaatccgatgccattgcagcaggttctgttcgctaccatcgacaatgacaatttgccagatgagcaacacctgcgcggcgttttgcaggtggctctcatccggacgatgcaaataacgtaaaaattcgtcaccagcactctttcccatttgatcgaccatgctctccacgggtacgacatcgatgttcagccgatcgctgagacggcgaatcgcttttctggccccggatgtcagcacccgaaaaccaaccacaaacactaccgccagcgtggcgagcattatccagatcatgagttctcctgcgtaatcagaactcatgatatctggaaaccctcgccagttattaatccaccagaataatcttcagtgcaaacagagctgcgaccaccaccacacacaggttcagatcgcgccagcgcccggtgcatactttcatgatgcagtagctcataaagccgagtgcaatcccttcggtgatgctgaaagtaaagggcatcatcaccgtggtaataaacgcaggcacgctttcggtaaaatcatcccagttaacgcgcgccaggctgctagtcatcagcacgccaacaaagattaacgctccggcggttgcgtaaggaggaactatcgccaccagcggactgaagaacataaccaacaggaacataacgccaaccacaaccgcagtcagccccgtgcggccaccgactgccacaccagaagtactttcaatataggcagtaacagagctggtgccgataaacgcacccgccacgctactgacgctatcaacatacagcgccttattcatattggggaatttaccgttaccatctattaagcccgctttatcagttacaccaattaatgttccactactatcaaataggttgatcagcataaaggagaaaatgataccggcgagttcaagtgttaacgcgccgctcaaatctacttcaccaatgacgccgctaatatcaggcggaatggaatagacgccgctaaaatgaacatcaccgaaaaataatccacagcaagacgtcaccacaatagaaaccagcaccgcggcatgaaaatgacgactactcaacacggttataataaaaaaccctaaaatacctaacaacacgccgtgagaacttaaatcgccaatcatcaccagcgtgtctttattggcgacaataacgccagtattttttaatcccattaaggcgataaataatccaattccgctggtgataccaatacgtaaacttaagggaatgttggagatcatccagtaccggatacgaaacagcgtgagcaaaaatagtccaactgcgccccagaatattgcgcccatcccggtctgccaggagatgcccatcgcccccacgaccacgaaggcaaagaaggcgttcagccccattgccggagccagcgccacgggtaagttagcaaatatccccatcgcaatactgccgataccggcaatcaaacaggtggtaacaaacaccactttcgggtccatttgtgccgcgccgaggatttgcgggttcacaaaaacgatgtacaccatggttaaaaaagtggtcatccccgcaatcaattctgtgcggacggtggtcccatgctgaggtagtttaaataatcggctaagcgtcccactttcattactcacgtaatcggtattgtcattattcatttttttgtccattggaggagatttaatcccttgcttttgtaaaacaaatgacaacaacggttcagtgataattatcacatttcaattgcacattaatggatattctttaataatctcgcgacgtttctttatgataaataataatcaaattgataaaatcaaaatgagaaaaatatgaataattctattaaccataaatttcatcacattagccgggctgaataccaggaattgttagccgtttcccgtggcgacgctgttgccgattatattattgataatgtctctattctcgacctgatcaatggcggagaaatttccggcccaattgtgattaaaggacgttacattgccggtgttggcgcagaatacactgatgctccggctttgcagcggattgatgctcgcggcgcaacggcggtgccagggtttattgatgctcacctgcatattgaatccagcatgatgacgccggtcacttttgaaaccgctaccctgccgcgcggcctgacgaccgttatttgcgaccctcatgaaatcgtcaacgtgatgggcgaagccggattcgcctggtttgcccgctgtgccgaacaggcaaggcaaaaccagtacttacaggtcagctcttgcgtacccgccctggaaggctgcgatgttaacggtgccagttttacccttgaacagatgctcgcctggcgggaccatccgcaggttaccggccttgcagaaatgatggactaccctggcgtaattagcgggcagaatgcgctgctcgataaactggatgcatttcgccacctgacgctggacggtcactgcccgggtttgggtggtaaagaacttaacgcctatattactgcgggtattgaaaactgccacgaaagttatcagctggaagaaggacgccggaaattacaactcggcatgagcttgatgatccgcgaagggtccgctgcccgcaatctcaacgcgctggcaccgttgatcaacgaatttaacagcccgcaatgcatgctctgtaccgatgaccgtaacccgtgggagatcgcccatgaaggacacatcgatgccttaattcgccgcctgatcgaacaacacaatgtgccgctgcatgtggcatatcgcgtcgccagctggagcacggcgcgccactttggtctgaatcacctcggcttactggcacccggcaagcaggccgatatcgtcctgttgagcgatgcgcgtaaggtcacggtgcagcaggtactggtgaaaggcgagccgattgatgcgcaaaccttacaggcggaagagagcgcgagactggcacaatccgctccgccatatggcaacaccattgcccgccagccagtttccgccagcgactttgccctgcaatttacgcccggaaaacgctatcgggtcattgacgtcatccataacgaattgattacgcactcccactccagcgtctacagcgaaaatggttttgatcgcgatgatgtgagctttattgccgtacttgagcgttacgggcaacggctggctccggcttgtggtttgcttggcggctttggactgaatgaaggtgcgctggctgcgacggtcagccatgacagccataatattgtggtgatcggtcgcagtgccgaagagatggcgctggcggtcaatcaggtgattcaggatggcggcgggctgtgcgtggtacgtaacggccaggtacaaagtcatctgccgttacccattgccgggctgatgagcaccgacacggcgcagagcctggcggaacaaattgacgccttgaaagccgccgcccgtgaatgcggtccgttacccgatgagccgtttattcagatggcgtttctttctctgccagtgatccccgcgctaaaactaaccagtcaggggctatttgatggcgagaagtttgccttcactacgctggaagtcacggaataataaaaaaagcccggcgtcatgccgggcaaaagtcaccagttacgtttatgccactgtcaactgctgaatttttttctcgcggcggattttgcgttcttccattaccgccactatcgccatcaggcagatacaaccaatcgcggcgatatccagcgcggcgaaggtgcctgcccagccggtaaggccgaataccggcgtcccatcggcaatcattcccagacctaacttggcaaagctgtcaccaatcaggtaagcaaaggtgcctttaataccatcggcagcgccaatcgcttttttaggtacaaagccaacagcagccacaccaatcaacaattgcgggccaaagaccaggaaacccaacgcaaagagagaagccagatagatatattcgttactggcatgttgatacacaccgagcgtggcgataatcagcgccagcgcgatgcaggccaccaggccacggcgaccgttcgccaggtcagagagccagccccacagcagcgtaccgaccagcgcaccagcttcaaacagcgtaaagccctgaatcgccaccgctttagagagtttcagttcctggaacgcgtatacggtactccactggtcgataccaatacgtaccacatagaggaaaatgttggcgaagcacagcagccagatcactttgtttttcagcacatactcaacaaagatctgccacttggtcatatcggtagattctgtctctttgtcctcttcgctgatctcctcgccgaacagttcttcagctttgccgaggccataagattccggggagtcgctgccgtaacgcaggccgataaaaccgacaatcagcgcgataatgctcgggaagataaacatgccgatgacatggccatcgaacaggtaatttgccccgaacagcgccacacctgctgcgcctgcaccgccaaggttgtgagaaatattccagaaaccgaggaatgtcccgcgtttacgacgcggcgtccatttggtgatggtggagtaactgcagctaccgccggtactctggaaaaagccgcttaaggcgtagaaggcaatcatcaggaacaggctaacgctgccgctgcccatactggcactgaagcccagcatacaaatagcagagaggatcagcatgaacggcaggaattgtttggtgtttttgccgtcggcgtagtaggaaaccagcgttttacccacgccataagtgatggagaaacccaggccgatcatccccagctgcgtcatgctcaacccgtaggtgctaatcatatcgttctgcgcgatgttaaagttcttgcgaatcaggtacatcgtcaggtagccgataaagaccaccaggtaggattgcatgaacggtttgaaccacattttgcgccgcacttcgagcggaaggtccagggtcggcttgcgaacctggtttaagaaagccagcatgggttactcctgaaatgaatacctgcgtgaggcatgcattgtaaaaatcagcagcaaatcaggcctgagatagcgtccaggcaaaacctggaaaatttcttagttttgccggatatgaagtgaaaaggtgagatgcatcacgcttcgcgcggtgtctgggcgttcaaaaagggcagtaacagcagtgcggaaatcccggcggcgatagagataaccacaaaaaatccgctccagtgccaggtatcgagtactttcgccagcggccaaccagcaaggctcgcccccagataagcaaacaagccgacaaaccccgtcgccgcccctgccgcctctttgtgggaacactctgccgccgccataccgattaacatctgtgggccaaagacaaaaaaaccaatggtgaagaagcaggttgcctgcatcacgtagctggcaaatggcatcagccacagggagccgacactaagcaaaattccggcggcgaaaatcaaattcatcggccctcggttgccgttaaacaatttgtcgctgccccaaccggctaccagcgcaccgataaatccgcccagttcaaacatcgtcactgccgtattcgccgtgaccagatcgacgcccagtgtctcggacatatacaaattgccccagtcgttgatcgccgcccggaccacatagaccagcacatagcaaaagctaagcagccagatatacggattcagcaacacatatttggtgaggatctctttacgcgtcaaccctgccccttcttgttgttgagcaatttccagcgcgtcgtgtcgccattcaccgaccgccggtaaacctaacgcctgcgggcgatcgcgtagccgccagcagagaaaaatccccacgactatcgccatacaaccagcaatcatcatcccggcacgccagccgtaatgcagcgcagccgctgccatcacaatgggaatgagtgcgccgccgacgttatgcgccgtgttccataatgcccaccaaccgccgcgctcggtacgactataccaggccgttaacagacgcgcacacaccggactaccccagccctggaaaaaggcgttcagcacccagagcacggcaaacgcccataggctcgtgctgaagccaaacagaatgttgataatgcccgtggcgataagccctatccccataaaataacgggcattactgcgatcgctgacaatgccggagacaaacttgctcacgccataggtaatgtaaaacagggtcgctaacaggccgatatcgctacggctgagcacgccgttagcaaggatttctggtacggcggcgttaaaacttttccgcgtgaagtaaaacagcgcgtaacccagccagatggtcagcagaatatgccgacgccagtagcgatagcgggcatcaatttcatatttatcagtcattaatggcgcatcggcaggcgctttcagaaacggcaacatcatcaaaccttagacatagcgttgaggtagagaaacgctgacacgcgtgccgtgcagacaggaaatgtgtaatgtgccacccagcgccgttacgcgctcgcgcattccggtgaggccaaaaccttgttgcccggaacccggcggcaaaccgctgccatcgtcttcaataaccagcatcaaccgttcatcctgctgccagccttgcagggtgaccgcgctggcatcagcatgtttcacaatgttgttcagcccttcctggcagacacgaaacagcgtcacgcgctggttttcgcttaacgcactttcatcgattcgccattcgagatggctgacaataccgcgcccttccagctccatttcccgcatcagactgcggatggcctgctccagggtgagatcatccaactggcgcggacgtaaccgacccaacaaacggcgcaccgcgtcgtaaacgcccaggcttagttgttcgatgagctgcccgctctgcttcacgctggcgttatctgccgccagccgctgaacaatgcccgcctgagtacgaatagcagtgatggtctgaccgatatcatcatgcagctcacgcgccacatcacggcgcacgctctcttcggtttccagcaaccgttcagccagatgctgattgcgcgccagttccttttgcaggctctggttaagttcacgcaaccgctggatgccagcgccaagcaacaaccctgtcagactttgcaccagcaggctgagcaataaatccaccggatgatcgcgccaggtttgactggcgatcagcgcgatggcgttcatcaacgtcgcaatcagcgccccttgccaaccatagtgccaggccagcgcgataatcggcagcgccagacagaatggcgtaaagcggctcagttcgtccggcaatcccaactggagccagagactgataacaaacagcagcaagtaccagaccagatgtcgcccgcgccagttgattggctgagaaaccagactcggaccgagcggcagccaggtgttattggcgagatagtgccagaacaccagacatatcggggccagcgtcaggccgccagttaaagtcagcaacagcgcattccagctctctttgccgtgccaaagccagggcaggctctgcaacaacgccgccgccgttaacgccgccccctgtaacagcaaggtgcgccagtcacgctgatggcgatagcggctgatcagcgctacgggcagtaacgtcagtaaactaccgatcatcaataacggaaaatgggttaaaccgaccgcctgcgttagccagtaaatcagcagccactccgcgcccagcaatacgggccagtatccgcgcgggcattgcagcattagccccagacgcagaccaaacggaaataacagcaccgccatatcagggcgctcaaccagatgcaggctgatactccacaggcaaaaccatgcggcagagaagataaaaaagcaggcaataacggtaattaagcgggagaacaacgtcttcatcaccagccatcaaacatgcggcgcgccagctctacgtcgttactgacgcccagtttttccatcagattggcgcgatggacgtgtaccgttttcggactcaagcccagttcggcggcaatctctttcaccgccattccttgcgccagtttttccgccacctggcgttcacgtttggttagcgggtcctgacgaccggatgccagtttaatggcaatatccggcgtcagataacagccgcccgtggcaaccgtatgcaccgcagcaatgagttcatccgggctacagcgtttggaaagaaagccgcgtgcccccgcgttaagcgcctgctcaaccagcgcaggactgtcgtgaacggagagcataatcgtcgccatacctttcggcagctggcttagcagctccagaccggagatatcgggcatggagatatcgcaaatacacacctgcacaccgcgccccggcagccccgccagcgcctcgcgcccgctaccaaactcggcaactacctgcaaatcaggttccagccccagcagctgcgcaaagccggagcggacgatgaggtgatcgtctataagggcaacggtgatcatggtcttgtcctggcgggtaaaaaaaatacgcgcttaccttaacgataagcgcgatgttgttcaagccttgagcggttactgaaaaaacaccgcgatcttgttaaacatcgtcggatcggactgattacgctgcactttcacgacatcttccagcttatcgatttggcttatcatctgctccagacgctggtcgtcattgaccagtagccagatatggcttttgtcgctgtcctgaatcggcagacaaagaatgccttcaacgttaaaagcgcggcgggcaaaaaggccacaaacgtgggtcattacgcccggatggttgcgaacggtgagctccagaattacgttgtcatgagttgtgttttgcatggcttattcccccaccatttcagtattcgccgcacctggcggcaccatcgggtaaactttttcttcggcatcaatgcgcacatggatcagcgccgggccagggcgattgatgatttcctgcaaactagcctgcggatcggcttcgttattcaaatcacaggtttcgaggccgaatccggcggcaatctgcataaagttgattttgcccggataggtggcggcaaaaacgccttgctcgtagaacagactctgttgctgatgcaccagccccagcgcttcgttgttcatcagaatgattttgacatccagctgattttcactggcggtcgccatctcctgaatattcatcatcaggctgccgtcgccggagaaacacaacactttgcgatccgggttcgccagcgcagcgccaatcgccgcaggcaggccaaaacccatcgtgcccagcccaccggaggtcagccactggcgtgggcgattgagcggataagcttgcgcggtccacatctgatgctgaccaacgtcggtggtgataattgcattgtcatcgacacaggcggcaacggcgttgatcaggccgtaatggcttaacggatcgcacgctttcgggattggacacggaaactcacgctgcaaatccgctaccaactggtgccactctgcacgcggttgcgcttccaccagcgggatcaactgcgccagcacgtcatcaacatccgcctgaatcgccacgtgcggctgcttgattttacccagctctgcacggtcgatatcgacatgaatgattttggcattcggacagaactgctcggttttgccaatcgcccggtcatcaaaacgcgcaccgagcactatcaacaaatccgcctcctgcaaaatatagttggtgctgcgcacgccgtgcatccccagcatacccaggctcaacggatgcgcttttggcaacatgcccagcgccattaaagtcatggtggtaggcagttgcgctttctccgccagttcacgcacccgtgcgggcgcattgatcacaccgccgcccagataaagcaccgggcgtttggcagcgttaatcatcgccgctgcgtcacgaatgctttcttcgctaaaggcgggggcggcggctttttctgccatagcgggctgtgtttcaatctcaaaaactgccgtttgcacatccttaggaatgtctatccacaccgggcctgggcggccactttgcgcaatgcggaaggcatcgctcatgacctgcgggagttcttcgatatgtctgaccagatagttgtgtttggtgatggggatagagatgccgtaggtgtccacttcctggaaggcgtcggtgccgatcatgctggcgggaacctgaccagtgatgcaaatcagcgggatggagtccagccgcgcatcggcaatggcggtcaccaggttagtcgcacccggtccgctacaggccatacagaccgccggtttaccgtcggtgcgcgccattccctgagcgataaagcccgcgccctgttcatgacgggccagaatatggcggatttgcgtgctttggcttaaggcatcgtaaacaggcaggatagaaccgcccggaatgcctgtcacaatcttaatgccctgctgttccaggaaatgaacgataaattctgcgccggtaaagcgcttacgcgtgcttgttgtgccgctacttgccatgctccagtccttttcttctgggccgactttccgggaggtgcttaaacgaaaaaccccgcccggtttgcgccggcggggttttggaatcgtgtgttgttccagtccttacggcgcattgccgacgaccaccaccacacgcacgacgaccactgcggcggatggcgcagttggtagtagttttgcgttgagcatggaagtagtcattggggaccttgttggttttgtgtttaacaatatttatacaagcacagctttacaggggagacaatggaaaatttttcagcaagggaaaattgaggggttgatcacgttttgtactgaattgcagataacaaaaaaccccgccggagcgaggtttcgtcagtcgcctgcggctggtaaccgcaaagcacactgtattatgtcaacactgaaagtatacgtgttccgcgcagaacgcgcaatttcggcacgaattttgacgtatttagtgcatagttgagtatcgatcacagtttgcgttttgtccaaatattactgtttatttatacagtaaacttctataatatcactgtacgcaatgtgttatgcgggggccgcatcgttacccggcgcactaagttctggctgaaacgggtggtgccgtcagcgccttaaccccgcgtgagcacactgtgttatgtcaacaagcacaacgtttctccttgagataccgcgtgcacaacagctggcaacaggcagcggaaaggtacgtcagctggcagtgctcctgaaccacaggagacgcgtatgaacctggtggatatcgccattcttatcctcaaactcattgttgcagcactgcaactgcttgatgctgttctgaaatacctgaagtaattcagattcaagtcgcaccaaaggggagcgggaaaccgctccccttttatatttagcgtgcgggttggtgtcggatgcgatgctgacgcatcttatccgccctaccatctctcccggcaacatttattgccgcttttgtttacatattctgccgctaaacaattccccattcctggcgtatatctggctaacattcatcaatgtgatagattcctctcccgcatttatgggaatgcgtagtgacttattctaattatttttataaaagcatccgtgataatgaaaaggcaaagaaacgtcaatttgttattgatgttggtattactcgtggccgtcggtcagatggcgcaaaccatttatattccagctattgccgatatggcgcgcgatctcaacgtccgtgaaggggcggtgcagagcgtaatgggcgcttatctgctgacttacggtgtcagtcagctgttttatggcccgatttccgaccgcgtgggccgccgaccggtgatcctcgtcggaatgtccatttttatgctggcaacgctggtcgcggtcacgacctccagtttgacggtgttgattgccgccagcgcgatgcaggggatgggcaccggcgttggcggcgtaatggcgcgtactttaccgcgagatttatatgaacggacacagttgcgccatgctaacagcctgttaaacatggggattctcgtcagtccgttgctcgcaccgctaatcggcggtctgctggatacgatgtggaactggcgcgcctgttatctctttttgttggttctttgtgctggtgtgaccttcagtatggcccgctggatgccggaaacgcgtccggtcgatgcaccgcgcacgcgcctgcttaccagttataaaacgcttttcggtaacagcggttttaactgttatttgctgatgctgattggcggtctggccgggattgccgcctttgaagcctgctccggcgtgctgatgggcgcggtgttagggctgagcagtatgacggtcagtattttgtttattctgccgattccggcagcgttttttggcgcatggtttgccggacgtcccaataaacgcttctccacgttaatgtggcagagcgttatctgctgcctgctggctggcttgctgatgtggatccccgactggtttggcgtgatgaatgtctggacgctgctcgttcccgccgcgctgttctttttcggtgccgggatgctgtttccgctggcgaccagcggcgcgatggagccgttccccttcctggcgggcacggctggcgcgctggtcggcggtctgcaaaacattggttccggcgtgctggcgagcctctctgcgatgttgccgcaaaccggtcagggcagcctggggttgttgatgaccttaatgggattgttgatcgtgctgtgctggctgccgctggcgacgcggatgagccatcaggggcagcccgtttaagcgcacgtcaccgcagcatcgtcatcagctccatgggagaacgatgctgctttatcagatcacgcatcacccgcatatgcggtgcggagtaagaataaaacgcctgatagcccgcacaaagcacgctgtctggcgtctcctgccgagcgtgcgggcacaggcgatgccagtcgcacgcctggcagtcacagcgcggttgcgggttttcgctgccacaccatttttgtaaggtggcgtcaaaaagctcaatgctgatacgactgatatctgcccgcacccaacactcgaacagggcaattaaaaatttcccccacagctctgctgtcacgctagcggccgtcagatcgccccggtcatcaaattcaagatagggaatgagctgtacggagcggatgccccgctgtttgaaattgtgataaaaatcggcaggttgcagagcatccttgtactctacaaccagtttatgcctgtcctcttcagcatcaatgacctgacttcctgtcatgcgactctctcaataaatacgataagttgatgtatatgcgttacagcaaacagtattgcgagagataacaccgcgagggagatcaaaaatttgtcacggactacgtgaaattgggaaaaatcgctattcgtgacatccattaaattgcgattacgggtgtagtgccagaggatcagcgccacgatggcgagaatgccaatgctaatccagaataacatgcccgcctggtgccagttgtgtttgatagccaacgccatcaacgcgccgtagcccagcatggtacgaaaccacgccagacttgtgcgctccggctgcagtcctgggtcggcaatgcgtctggctttgcggctatccggcatacaacaccagtcccataacgttaattatccggcatacaacaccagtcccataacgatcaccgccacgaccatcaatattaagctaatgattaataagctgttggtgtagggcaggtcctctttcagacgcatcgctttttcattgcgtaaccagcgcaagtagccatacatcgctaacccgccggaaaacagacacaacaacaacgccagcagttcgcgaatgacgggcgtggcgaaatctggcgcaagttgatcaagcccaacccccgccgccagaaatcctagtgcagtacggatccacgccagaaaagtacgctcattagccaggctgaagcggtaatcaggcgcttctccgaggcgggaaattttcattgttgctcctttgcaatttcactaacgctctacctttagcggtttttttaagaatttcgtccgcccgtttcctgatatgcttttgccatccgctacaaggaggtcagatgggtatcatagctcaaaataaaatcagtagtttgggcatgctgttcggtgccatcgctttaatgatggggattatccactttagtttcggccctttctccgcaccaccgccaacgtttgaaagcatcgtggcggacaaaacggctgaaattaaaagaggtcttctcgccggaataaaaggcgaaaaaattaccaccgtggagaaaaaagaggacgtagatgtcgataaaatcctcaatcaaagcggtatcgcactggccattgctgcgctactttgcgcatttattggcggtatgcgtaaggaaaatcgctggggcattcgcggcgcgctggtttttggcggcgggacgctggctttccataccttgctttttggtatcggcatcgtgtgcagcattttgctgatattccttatcttttccttcctgaccggcggtagtctggtttaagcagcctgaataatgcccgccgggtgatcatcagcgggcattatcgtcagaacttctgttttttctcctccaccttcaccccttgtgtcggtaggccggtgtcatagtcgcgtacaactgggctatagccatcttgtggacgtggacgaaacgcccccatccagcgcggccgtgcatctttacgccacggacgcagactccattggtaactgcggaacggatcgcgaattttgtccatgtaatccaataaggcgtcatgcattttgctgcgaacgtctgcaaaacggatatcatcgatcaggttatgcatttcatttgggtcattacggcgatcgtaaagttcatcactggtgaagaggttgagtaccagtttaaagtcatccgtcacccagcaacgcaccggaataaaaccgccaaagctgtcatgctcaatctcgtagcggttaaattccaccatcacgccgcgtggctctttcacggcaaggatattttcccccggcagaatctctggtttttcaatatctgccagcgccatcattgtcggcagtaaatcgatatgactgactggcgtatcgacctgtcgccgctccccttgcgggctacggatgatcagcggaatgcgggtgatgtcgtcatacatcgccgcccctttactgatcagcttatgtgcgcccatcatttcgccgtgatcggaggtataaataacccacgtattttcacgttgctctggcgttaaggcattgatgacccgtccgatttggtcatcaacaaagtcattacaggcaaaatagagcggatggtgataaagcccgtcatcaccgactgggcttggcatcgcctgcgcccataagcggtgatgttccggtttgttagccaggtcatcctgtgctttctcgcccagctcgtagtaaaaatcagcgtatttctctaaatactccaccggacaggtgaacgggtgatgcggctcatcatagctaaccaccatcaggaaaggctcgtctgcgcgcgcaggctgttgcagaaaatccaccgcccgattgctgatacgatgcgcccaggtgaaggtttcgtcgatatggttcgcctgtaaatcttcgacgctgtttaggccattgcgccacaggctaatctctttttccgtcagttcgctaagatagttcgccccatcgaaccagtaatcagcgtcccactccggcggacactcgccagtgccgaaatagtcatgaccgtcgagatgccatttgccgatgtaacaggtgtgatagccggcatccttaaagtagcgccccatagtggagatgtttttgcctggcgcgacgttgttggtccacgggccggactggttagcgtagataccggtaaatagtccggcccgtgcaggcgtacaaaccggactacaggtgtaggcggaattaaagcgaataccttccgccgccagactatcaatattttgcgtattcagcggtttaccgctatagcaaccgaccatattggtggcctgggtatcggtcatgacgaacagaaaattggggcgtttcataggctatccttcccgtcgggagtaaaggttacggctgggtcgtgacgatgccgccagctgtcaaaaatcaggtagacaatcactacggcggcaatgaaataactgatcatcgctaaccagcgcgtaccgtagccgccgaattcagccagcccggcatagacgccaatcatcgcgaacaggatgccaatactcgcgatcttgacgtttttccacggtttcatgtccaccgcaaacgcatctttgaaggtgaacggcgtggcgcgcggtttgataaaaccgatcaccagcatcacgaccacgttgatgcagaacgtacaggccagcacatagaggaaatggaagtcgaacttcaccagatagttgatggtgatgtagctgattatgccaatccccatcgctacttttgccgccagcgccgggatgcgcgggaagaaaaagcccataatgatgatggtaaccagcggcacgttgtaaatgccgttgagctgtttcatccagctatacagcccctgcggcgcgttggcgatccacggcgcgaccagcacgctaacgatagcgataaagaaaccaaatttgcgcccgacggtgaccagctgctgcggctcggcattctggttaatgatgcgacggtaaatacccatactgaataacgtactggcgctattcagaaagccgttgaaggtactgatcaccgcaccaaataacaccgcgccgaagaaacccaccattggcactggcagaacgttattgaccagcgtcgggtaggccatgtcggctttcggtaaatcctgatacagatgaaacgcaatcaaccctggcagcaccagtaccagcgggtcgagcattttcagcaccgccgttaacagcgcccccttttgcccttccgccaggcttttactcgccagcgtgcgttgcacgatgccctgatttgtacaccagtaaaaggtgttcaccagaatcaaaccggtaaatgccgcgccaatcggcaagggatcggtcgggccaccgatactgtttaatttctcggcgtgaacggtggtgagttgctcaatgccctgcataaagctgcccttgcccatcgcgattaggccaaataccggcaccatcaacccgccgataaccagcccaataccgttgatggagtccgccactgccattgcgcgcagtccgccgatcaccgcatacaaaattcccgccagaccaagcaaaattaccagtagccagatagccgcaccgtgagaaatctgtaggctttccccgacgtgaaacaggctgttgagcgccaacgcgccggagtagagaacaatcggcagaaagcagacgccggtggcaattaggaagcagaagtcgatgataatacgcgtcgttttatcataacgttcctccagaaaatcggggatggtggcaatgccgcgcttcagatagcgcggtaaaaagattagcgcgaggaagatcagcgtcaccgcactagtcacttcccagcccatcacgctcatgccgcttttgtaggcctgcccggaaaggccgaccagttgttccgtggaaaggttggttagcattaagctagcggcaataaccggcgcttttagactacgtccggcaagaaaatagccttgttggcttccggtatctgttttgcggaccttccaccaggtgatcaccgccaccagcagcgtaaaaccgacaaaactcaagatttgtaagctattcatctcatagcccttatttatgtttatgtcccggacgcatgaatatagggagaggtaaaatgcgtcgggtcaggcagtcagattcttaaaatacaaacgtcgtatccctgaacggattgttttctgttaagttcaggttgtgagcataattcgccggagggatattaaaatgaatggaaaattgcaaagtagtgatgtaaaaaacgaaactccgtacaatattcccttattgattaacgaaaatgtgatctccagcggaatttctctgatcagcctctggcatacctacgccgacgagcattaccgggtgatctggccgcgggacaagaagaaaccgcttatcgccaacagttgggttgcggtgtataccgtacaaggatgtgggaaaattcttttaaagaatggcgaacaaataacactgcatggcaactgtattatattcttaaagccaatggatattcactcttatcactgtgaaggtttagtctgggaacagtactggatggaatttacccccaccagtatgatggatattcccgttggtcagcaaagcgttatttataatggcgaaatttataatcaggaactcaccgaagttgctgagttaataactagtccagaagcaataaaaaataatctggcagtcgcttttctgacgaaaattatttatcagtggatttgtcttatgtacgcagatggtaaaaaagatccacaacggcggcaaattgaaaaattaattgccactttacatgccagtctgcaacaacgctggagcgtagctgatatggctgccacgatcccctgtagcgaagcctggttgcgtcgtctgtttttacgctataccggcaagacgccgaaagaatattacctcgatgcgcgtctggatctggcgctaagcctattaaagcaacaaggaaacagcgttggcgaagtcgctgatacgctcaacttcttcgactcctttcatttcagcaaagcctttaaacataaatttggttatgcgccgagtgccgtgctaaagaatacggaccagcacccaacggatgccagtccacacaattaacgtaactctggccagtacgctttgttggcctccagcaactcatccagaatagctttggcgacgctggcgctcggtaccgttttgctcaacgtaatcgcctgccacaggtgctgataactacgctgttcccaggcgtccacgaccagtttttccaccgccacttgctgactcattaaccctttctgaaactgcgggatatcgcgctccaccagtggttcaggccgtagtagcgcacgcgcatctgtttgcgatcttgcagcccaacaatttgcgccatccggctttcaataccgattggcatgtcacagatgttgaggattttcgcattcgggcgcagacgacgcgtggcttctgcgacaatggctgccgggttggagtagttgagcatccaggcatttggactatatttttccatataatccaccagttccaggacgccgccaatggaacgcatgccgtacgctattccgccgggtccgcaagtttcctgaccaacaacgccgtggcgcagcgggattttttcatccagttcgcgcatcgggtatttgccgacgcggatgtgcgccatgacaaaatcaacgtcgctgaatgccacttcaggatcggtggtgtaactaaacgcaatgtccggcgctttttctttaaggatgactttacaggcttcggcaatcacttcctgccgcgcaccatcgttatcataaaatttcagtgcacgaagcgggaaacggtcctgattcgccaggagcatcaacacgatgcctggcgtaaaggtgcttccaccgcctgcgacaaccacactgaatttggtcattatactgcctccgtaatggcaacattttctgcactttgatgagaattaattaagctatcgagctgttcacgcagctgagatacatgcagaccaatgatcacctgaatggcatcgccactacggaagacgccgtgcgctcccagctttttaaagacttcgtcatccagcgtttgactcatgtcatgcagtgcaatacgtaaacgcgtcgcgcaattgttaatgctggagatattgccgaccccgcccagggcttgcaggataccggcagcctgatccagctctttttttggctctgccgcggtggtttggcctcggctggctttgtattcggctttactgtagagtttcacttccgcatcttcacgtcccggcgtgcacatgttgaactgcagaatcagtgtgcggaaaaccacgaagtacagcagggtaaagcacaacccaatggcgatttgggtcagcatcatatccgcgtggttgctgaacatcgggatccagttttgcggtaaaacttagtcaatcagacctccgcccatgttgcccaccacaccaaagagatacattacggtgctcatactggccgccagcacggcgtgtaccgcaaacagcaacggactaatgaacaggaaggtaaattccagcggttcggtaattcccaccagcatggcggttaaggttgcgggaatcagcaagcccgccacttttacccgattttccggtgcggcagtgaagtacatcgctaaagaaatgcccacggcaccaaagattttactgttaccgtgcagggcaaaaccgccttccgggaacaagcttttcagcggctcggcgctcaaactgaactcttgcagatgctgcgcccagtacatctgaatgccgccttcaacagctgccggaccaaagataaactgtccgtagatgaagtggtgtaaaccggttgggatcagaatacgttcgaggaaggtgtaaacccagaccccaagtgcacccgcgctacgcaggaacgcttgcagagattcaatccccatttgtacttttggccagccgagcaacgtcagccaggcacaggggatcatcaccaggaaggcgataatcaccacataagacgtcccctggaaaatgccgagaaaaaccggcagttttttatcgaacagacggttatgcagcgccgtcacaatgccggaaatgataattgcgccgataatgctggtatcgagggttttaatcccggccatcattgtcagaccgctacctgccaccgcgtcctgagtgaaatcgacgccgaagtagcttccccaggtcattcccatcgcgttgatgaaatagttccaggtcaggaaactcaccatcaccgccagacaagcacgcccctgcgcttgcttagcaaggccaatgggtaaaccgacagcaaaaatcagcggcatattacggaataccgtccaaccgccctcttcaataatgtgtacgatttgcgcgaataaactgttcggatcggtcagactttccccgacaaacatcgggttttgcagcaagatggcaagacccaccacaatcccggcgaagggaaacagcagcactggcgtgaacatcgcgccgccaaagcgttgaatttgactgagcatttccacatcctcttttctcaattctgtaagtaggaagcctgattggttatgcggcaggcctggagcgaggataggaagatgcgatcggcagaacatgacgacccaatgggattcgtgatcgctttcatgcttttcgttgggcggtagagatctacgttttcgcgaaaaagtagacctctgtgagcacaggtacacagcatcgaacacatctttaaaaaaaagatgttttttcaatcgattaagcagaacttgtgtgcgcattacccgggcttgcaggcaaaaaagagatctagagatgatctacaaaagcattgcggagcggttaagaattcgacttaactccgcagatttcacgctaaacagccttcttcccggtgaaaaaaagctggcggaagagtttgcggtaagccggatgaccatccgtaaagccattgacctgctggtagcgtgggggctggtggtccgccgccacggtagtggcacttacctggtgcgcaaagatgtactgcatcaaaccgccagtctgaccgggctggtggaggtgttaaaacggcagggaaaaacggtcaccagccaggtgctgatttttgaaatcatgcctgcgcctccggccattgccagccagttacggattcaaatcaacgagcagatctacttctcccgtcgcgttcgttttgtggaagggaaaccgctgatgctggaagacagctatatgccggtaaaactgttccgtaatcttagcctgcaacatctggaagggagcaagtttgaatatattgaacaagagtgcgggattttgattggcggtaattatgaaagcctgacgccagtgctcgccgatagactgctggcgcggcaaatgaaggtagcggaacacacgccactgctgcggatcaccagcttgagttatagcgagagcggggagtttttgaattatagtgtgatgttcagaaatgccagcgaataccaggtggagtaccatttacggcgactccacccggaaaagagttaaccgatactccagaagagcaccgccagtaattggggggtgataatgcgcaggaacattaccaacggatagacagtggcgtaagagagcgccgccgcaccgctggttggatgaagattattagcaaacgccagcgccggaggatcggtcatggaacctgccagcatcccgcacatggtcaggtaattcattttggctaacatccgcgccagaatgccaacagtaatcagcggaacggcggtgatcagggcaccataaccaatccagcttagcccttcgccattgaccagggtattcacaaaatccccaccagatttcagaccaacgacgctgaggaacagcacgatccccagctcccgcagcgcgaggttggcgcttggcggcataaaccagtacagcttgccgatactgccgatacgcccgaggatcaacgccataatcagcggtccgcccgccagccccagtttcaacgcggccgggaatcctggcacaaagacgggaatagaacctaacaatacgcctagcccgatgccaataaacactggcagcatctgaacctgttgcagtttttgctgcgcattccccagcacattggcaacggcatcaattgcggacggacgccccaccagattgaggatatcgccgaactgcaggctgatatcgccactggcgaccagttcgaccccggcacggttcaggcggctgataacaacgtcatagcgttctttaaagtgcaggtcgcgaatacgttttccgagcacgttttcattggtgaccaccacacgctcgacgcgcaaatcagtgcctttcgtggacaggctagtatcgacctcctgaccaatcaccagttgcgcattatgtaaatccgctggctgacccaccagatgcagcaaatcgcccagttggataatggtatctgggctaggaacttttagggtttcttcgcgtttcagacggctgcagataattttgtcgccgttgagaatcggtacatctttaatggctaaatcatgcaggttagggttctcaacgcgaatattgatagtcttgatcagcgcgccgccattggtgcgactagactcgtgctgctgagcttctgtctcgacattgacgcggaaaataacccgcaacatccacatggtgaacaaaatcccgcaaatgccgaatggatacgccatcgcgtaactcatccccatctgatcgaccatttccattggtgtacccaggtcgcgcaaaatctgctgccctgcccccagcgctggcgtattggtaaccgcaccggagaaaatccccagcactaccggcagtggaatatcaaacagtttatgcaggatggcggtaaccagaccaccgatgatgacgatcagaacagcaaacaggttgaggcgtaatccggagacgcgcaaactggcaaagaagcccggccctacctgaatcccgatagtataaacgaacaggatcaggccaaattcctgaataacatgcagcatatcgctacttaatgtcatccccgcctgagaaacaaaatggccgacgatgatcccaccaaacagcacgccgccaatacctaatcctatgccgcgaaatttgacgttgccgataaacaaaccgacgactgccaccaaagccagaatactgaccgttaatgctatatcactcatcgtccatttctcttgagataacattttaattgctacggattatggctgaatcggtgaagcagatttgccttatagcgcacattatcacgggaaagaacgtgccgaaatatcttaaacagtcgaaatttaacgcattgttgagtaagtaagacaaaaaaagccccaccagaatggcggggcaaagagaatagctagttagctatttaacgcgggacgttcgctgatagcgatacgctgcgctgcgatgggttcaggctcattacgaattaaatcaatatgcagtaaaccgtttacgaaggttgcgccagagacttccatattttcagccagcgtaaagctcaggctaaatggctgattcataagcccttgatgcagccattttttctcttcttttggctgctccggcgtgccttttacgctcaggcgcgtaccttccagttgaatctctaaatcttcctgacggaaacctgccagcgcaagggtaatgcggtagtggttatcgtcgcttttctcaatgttgtacggcgggaagctctggctttcaccggcgttttgcagtgcgttggccagtttgtcaaaaccgatccattgacgcatcagtggggataaatcgaagttacgcatagtcatttctccttctaagaagcgagtaagtacctgcaaatccgaagattcgcatatgctccctgacggcgagcatggagatgtcaggccgcgccaggcggccttagggaattagttgatttcgatacggcgcggttttttcgcttccggaatcacgcgttcgagatcgatatacagcaaaccatttaccaggttagcaccacgaacatgaatgttctcagctaactggaatttgcgttcaaagttgcgttcagcgatgccctggtacagataggtgcgctctttttgttcgtcggcgtgagcacctttcaccaccagcagattatcctgggcggtaatttccagttcgctctcagcaaaaccagccacagcgatagcaatgcggtaatggttttcgtctaccagttcaacgttatacggagggtagccgccattactctggctctggttgttttctaagtggttaaacaaacggtcaaatccaatagcagaacggtaaagcggggataaatcaaagttacgcataatcaatagctcctgaaatcagcgagaatgtaagaccttccacaatggacaggtcaggtagccagaacacccatcaggcgcgtcctcatcggctacgatgtaaaaatgggtctggaaatgaacttttcaagccttatcagcggacttttttttgcagtttatggtctattgcatagactgagggggcagcacgaaacgttaaagtgcgatagccgccacagtgcgacgtaatgatgatgttattttcagcaagggatcgctataactcatcaggccaacacccacgatcaacagatgaatttattatgataagaaatgtgttgttagcgttcatgatatgcagcggaatgacattactcggaggatgctccagcgtgatgtcccataccggagggaaagaaggaacgtatcccggcacccgcgccagcgcaaccatgattggcgacgatgaaaccaactggggcactaagagcctggcgattctcgatatgccgtttaccgctgtgatggacacgcttttactgccgtgggatgtgttccgcaaagacagcagcgtgcgcagccgcgttgaaaaaagcgaagccaacgcgcaagccaccaatgcggttattccaccggccagaatgcctgataactgatttagcgatcagtttcggtgatccacagctggccgccttccatccacgccagccactgaccatccgggctgaagaccacggcgtccgcagaaggactattggcgtggtgttcggttaaatactcaacctcgccgctttgcgcatgggcacaagcaattcgattatccagcacaaagcccaaccattctccactcggatgccagttaaatgcagactgaatatccgttttgttatgggttaactggcgcggctcgccgccctgtgggctgataagccacagttgcacaatgccgttatcatctcgcattaaaaacgcgatttgtgtaccctgcggattacagcgcacccagtggcgcgggacgttgactaaccccggataagcccgatggtgggtaaaggttaaacgtcgctgcacgacgccacgcggtggcgcgggcagggttgtttccgttccgcttaacggcgcatcacctgccgctttccagccagcttcatcttgcggtaactcaacgataaacagctccggcactttctcgccctttgggctaagtgtgtcgccaataaatgccagcgcgtgatttcctacccatccttcttcataagcacgattgatttcatcactgccaggctgtggcgtgggcgtggttttgctcaccagcacgcaccagtggctaccgctgtattcacgcggatgctgcttttgtacgttgaccgggccaaacggcgcagcaacaccgacgtttcgcaaatccagcgccggatcgagttcatgcattacatggtcgttataggtaaagctcaccctttcaccgttcgggctaaagacatgcacatggctgccgccgcgcagcactcctggcgtatacggcgcggtaatatccatcgcatcaaggttactcatcttgccgccttcaacaatcactccgcgccgatgatggaagtcgtaatgccatgtttcatcaggattttccgggccgtggatgaaaacatatttctcactcttcggatgaacggtcaccacgccgacgtgtgcgccctgactcgcgcgatagataacctcgacctcgccggtatggatattcacacgctcaatggtctcgccggtaaagctcgcgccagaaggacgcacgtcaaataccagccactggctgtcgggcgtccaggtattggtattggtgagcaggtgattacggggagcaaaggttatctgtttcatggcgcggtcctgatacaaaacgggtcccgccatcatacttcacaaggacttcactttcagacaatagtcttttgccatcgtgatgaatgtgagtgaaaagatggaacatttcgacgtggcgattattggcctcggcccggcaggaagcgcgttggcacgaaagttagcaggcaaaatgcaggtgatcgcgctggataaaaagcaccagtgtggtactgaaggtttcagcaaaccctgcggcggtctgctggcaccggacgcgcagcgatcttttattcgcgatgggctgacgcttcctgtcgatgtgatcgctaatccgcagattttcagcgtcaaaaccgtcgacgtcgccgcaagcctcacgcgtaactaccagcgaagctatatcaatattaatcgccatgctttcgacttgtggatgaaaagcctgatccccgccagcgttgaggtttatcacgacagcctgtgccgaaaaatctggcgtgaggatgataaatggcatgtcatttttcgtgcagacggctgggagcaacatattaccgcccgctatctggtcggtgccgatggcgcaaacagcatggtgcggcgacatctctacccggatcatcaaatccgtaaatatgtcgctatccagcagtggttcgcggagaaacatccggtgccgttctactcctgcatctttgataatagcataactaactgttatagttggagtatcagcaaagacggttattttatctttggcggtgcctatccaatgaaagacggtcagacgcgtttcacgacgctgaaagagaaaatgagcgcctttcagttccagtttggtaagacggtgaaaagcgaaaaatgcacggtgctgtttcccagccgctggcaggattttgtctgcggtaaggacaacgcctttctgattggtgaagcggcgggatttatcagcgccagcagcctggaggggattagctatgcgctggatagcacagacattctgcgtagcgtgttactgaagcagccagagaagctcaataccgcttactggcgcgccacccgcaaactgcgtttaaaactcttcggcaagatagtaaaaagccgatgcctgaccgcaccggctttaagaaagtggattatgcgcagtggtgtggcacatattccacagttgaaggattaaccaacgcgcttcacatcgcccaccagcaggatataagagagcgcgccaatcaacgcgacggcggagatataaaccagtgcaggtgcgaaaccgtaaccctgcgccaggtaccccaccaccagcggaacggtgatgccgcccagaccaccggcgaagttaaacacgccgccggttaaaccaatcaggcgcatcggtgccagagaagaaaccaggctccaggtaatgctagcaaaaccgttaccgaagaatgccagcgccatcaggcacataatcatcatcggatcgttagtgtagttagcgcccataatgcaggtggagatcagcaagccgcagataatcggcgttttacgcgcaaagcccagactaaagcccttacgtaccagcagatccgctacccagccagagagcaggacgccgacaaacgccgcgaggaatggcaccgtggtcataaagcctgctttcagcgccgtgattcctttttcctgggttaaatagttcgggaaccaggttaagaaaaaccacagtgtagaagccaccgcaaattgcccaagataaacgccgatcagtttacgatggaacaccagtttccagtctttggctgttaacggctgacgcgcctctttcttcaccggcgcatcaccatccaccagaccgccgccatcacgaatgtaatccagttcagctttgctgatacctttggtcaggcgcggcggctgataaaccttaaaccaaatcaggctccagataatgccgataccaccagtgacaatgaacacccagtgccagctcaacatctcctgaatccagatcagcagcggcgtcagaaacgccagaccgacaaactgaccagacgtataaaaaccaacggcagaagcgcgttcatgttccgggaaccagctggtcaccatccggttattggtcgggaaagcaggcgcttcgaaaataccggttatcgcgcgcagaccaattaaactcattaagcccgtggcaaagccctggaataaagtcgccacactccagccaaatatcgcaataaaataagtcacgcgagaacctacgcgatctaaaaaccaaccgccggggatctgacatagcgtataaagccaggcgaaggcgctaaatacatagcccatttccgctttggtaatgccgaactcttcctgaatatgggcggaagccacggccaggttggcgcggtcgacataacaaatgactaccgtaataaagatcatcaccagcgtcagataacgccgacgccccggctttgctgcattaacgggaatatccatagcgagctttctccagattttgggcatagcgaagccgctcaccatgccctgtaatttacagagggttatatttttgtattgctgttttagtgcccgatgaggggcttacgtggcaggaattaccactctgctacgctgttatcttcatgacgccagagcggattacgccagtccggggcatttttactgaactcaatcactttagcttcgtcgatttccacgcctaagcccggtttcgttaacggtttaaagaagccgccgaccatgctgaagtcttctttgtttttcacaaagtcgagtaactccgcgcctttgttgtaatgaattcccatactttgttcctgaagtacggcgttataggaaacaaagtcgatatgcaggcaagccgccagtgcaatcggtccgagcggacagtgcggcgcaagggtcacgtcataggcttctgccattccggcgattttgtagcattcggtaataccgcccgcgtgggagagatccggttgcagaatgctaataccacctgcctccagcacgcgtttaaaatcgaagcgactgaacatgcgttcacccgccgccagtggaatatgcgtttgtgccgccagtttcgggtagtattcggcttgttccgccagcaccggctcctcaataaacagcgggcgatacggctccagttctttaatcagcactttcgccatcggcgcgctgacgcgaccgtggaaatcaagaccaaactcaatctgattgccaaaagcttcacgaatttgtgccacggtgttaaccgccgcatctaccgcgcgggagttatcaattagccccagttcttcacaaccgttcagtttgaaggtatcgaagccgatttcgcgtagcgttttaatgccgtcgataacatccgccggacgatcgccgccaacccaactgtaggctttaattttgtcgcgaaccaggccgcccatcagttgccagaccggcgcattcagcactttacctttgatatcccataacgcctggtcaatcccggcgatggcgctcatcaggatcggaccgccgcgatagaatccggcgcgatacatcacttgccataagtcattgatgcggcttggatcctgaccaatcaaatagtcacccagctcgtgaactgccgcttccaccgtacgggcgcggccttcgatcacgggctcgccccaaccgaccacgccttcatcggtttcaattttcaggaacatccagcggggaggtaaacgatacgtggtaattttggtgattttcattgcactgcctctcgatacgccttaacaaatgctgctgcctgctgcgcggtgcgctctacggattgcccggcgcgatagagatcgctgcctaagcccgcccctgcacaacctgcgtctatccactgcgccaggttttctggcgtcacgccgccaacggcaaagactgcgatgtcgcttggcaataccgcttttaacgctttgatgtattgcggaccaaaagcgctactcggaaatattttcagcgcctgcgcgcccgcttcgagcgcggtaaaggcttcggtcgccgtcgcgcagccggggcagacggtcatgccgtagcccaccgcacggcggatcacttcactatggatattgggcgtaacgatgagctgacagcccatcctggcgagcgcatcgacctgttcaggtttcagtaccgtacctgcgccaatcaacgccttgtcgccgtacgcatcaacgatggcgggaatgctttgctcccattgtggggaattcagcgggatttcaaccgcgtcgaacccggcgtcaatcaccgcgccaacatgcgccagcgcctcgtcgggcgtaataccgcgcaaaatggcgatcagcgggagtttagtttgccactgcatgagcgatgctccttataccagcctgaaatgccgtgtcgcccgccaccgccgtcacgtcgcaacccatcgcctgaaaggcttgctggtagcgcgcggtcaggcttgttccggcgacaagggtgatggcgtgttgatgggccacatagtcgcgcatactggcgacctctgcgccaatcaacaaaccagagagaaattcgctgacctgttcgcggggaagtgttcccagcacatggctggcgcgaacttcaaaaagctgcggcaatatggcgggcgtattaagaccacgctcaaggccagctgtgaaggcatcggcagagttttcctgcggcggcaaacctgcgccaatcaaactgtgatttaacagtaaatgatgtaattcaccggtcatcacggtgcgaaaatcgttgatttgctggctatcggcctgcacccatttgcaatgggttccgggcatgacataaagagaggaaggagccagagctcgcgcgccgatcaattgtgtttcttcgccgcgcatcacattgtggttatcgtcatgagagacacataatccgggaataatccagatattgtcgccaacactcgttaattgttcgccaatagagctaaaacaggcaggaacagataaatacggtgcaactttccagccgacgttgctgccaaccattcctgccattaccactggcgttttctcttcacgccagtcggtcgtgacttctgctaacaccgcagccggagattttccgttcaggcgcgtgacgcctgcttcactttgcctgctctccaggcagtggtcgccctgataaagccaggcgcgcagattggtgcttccccagtcaattgcgatgtagcgagctgtcatgtgatttcctttaaccttcgtgtgctgctggcgatcatggtaagcgccgcctgctctgccgcatcgccgtcctgatgtcgtatcgcatcgaacagcgccttatgttcctggagcgtttgcggcatgttggcctcatcgcccatccaggttcgttcaaaaaccgcccgctgcaggctactgatcgcaatgctaagttgctgtaacaccgggttatgcacgctctgcagcaccgcctcgtggtagcgaatatccgcttcgttaaacgcttcgcggtcctgattgttggcaatcatctcgttcagcgcgctttcaatctgcgccagatcgctggaagtcgcgcgctctgctgcccaacgggcaatcgccggttccaccagatttcgcacttcgctcatggcactgataagccgtgggtcgtagtcattttccagcacccattgcagtacgtcagtgtcgaggtaattccactggttacgcggtgccacaaacgccccgcgataacgtttcatttcaatcagccgcttcgccatcaggctacggaacacctcacggatgatgttgcggctggttgcaaactcctcacagagttccgcctcagccggaagcgggctgcctggcacgtatttgccgtgaacgatctgtttacccagcgtaatgacaatgcgatcggttttattgagagtcatggagagtccttgtgctctgtatgttcttctctactttaccccgatcgatgcataacgcggcaactttgtagtaccagcgtgatgacgttcgcgtttgccgtgcgtgtaatgtagtacaaacttatattgttgtactacaatttagatcacaaaaagaacaatgcataaaaaaatgacatgcgtcgggcagaaatctgaaaagggatatcaggcgctaaacaggagggaaagaagagtatgctttcaacggcttagctactcgtttaaaggattaatcatgaagttgaattttaagggattttttaaggctgccggtttattcccactggcgctgatgcttagtggctgtatcagctatgctctggtttcccataccgcaaagggtagtagtggaaagtatcaaagccagagtgacaccatcactgggctaagccaggcaaaagatagtaatggaacaaaaggctatgtttttgtaggggaaagcctggattaccttatcactgatggtgccgatgacatcgttaagatgctcaatgatccagcacttaaccggcacaatattcaggttgccgatgacgcaagatttgttttaaatgcggggaaaaagaaatttaccggcacaataagcctttactactactggaataacgaagaagaaaaggcactggcaacgcattatggttttgcctgtggtgttcaacactgtaccaggagtctggaaaacctaaaaggcacaatccatgagaaaaataaaaacatggattacagtaaggtgatggcgttctaccatccatttaaagtgcgattttatgaatactatagtcccagaggcattccggatggtgtttccgcagcattactgccagtgactgttacgctggacatcattactgcaccgctgcaatttctggttgtatatgcagtaaaccaataatcagtaagcgggcaaacgcgtttatgctgtttgcccgcccacagattaattcagcacatacttctcaatagcaaacgccacgccatcttcaaggttagatttggtgacaaagttcgccacttctttcacactaggaatagcgttatccatcgccacaccgacgcctgcatattcaatcattgcgatatcgttttcctgatcgccaatcgccatgatttcttccggtttaatacctaacacgtcggccagacttttcacccccgtacctttgttaacgcgtttatcgaggatttcgaggaagtacggcgcacttttcagcacggtatatttctctttcacttcctgcggaatacgcgcgatagcctggtcgaggatggcgggttcatcaatcatcatcactttcaggaactgggtattggggtccattttctccgcttcgcagaacaccagcggaatggtggcaacgaaggattcatgcaccgtgtagtagctgatatcacggttggcggtgtacagcgtggtgcggtccagggcgtggaaatgagaaccgacttcgcgagagagtttttccaggaaacgatagtcgtcatagctgagagcagtttgcgccacggtgctaccatcagcggccttctgtaccagcgcgccgttataagtaatgcagtagtcgcccggctgttccatatgcagctctttcaggtagttgtgcacacctgcatacgggcgacccgtcgttagcacgacattcacgccacgggcgcgagctgcggcaatcgcatttttaacggcgggactaatggtgtgatcgggcagcagaagggtgccatccatatcgatagcaatgagtttaatagccatgagttccccaggtagattggttcctgacccatgctaacgcgattccgctcaaaaatcagtacaacacccgagggaaaagggggatgcaacgcgcgttgcgtgctccctttttgcttagcggaagagtttccctttcagcagttccatgcctgcggaaagcagatcgttattggcttgtggactcacttcaccttgcggactgagcgcatcaataatcttcggcaattgttctgccagtaaactggaagctgtactggtatccacgccaagtttttgcccgagatcggacaccgcatttgtgccgagcgcgctttccagttgctcgccactaacgctttgattgccctgttgattactcagccaggtactgagaatggcccctaagccgccactttgcagtttttccagcagcacctgaatgccgccctgctcctcaacccaacttaaaatagcctgatatttccccgcatcgcctttcagaaaggcaccgacaacttcatcaaaaagccccatgataatcacctgtaaagcgttacgtgttgacccaaaaagtatagatttgcgggatgataattgcggattgcagaaataaaaagggcggagatgatctccgcccttttcttatagcttcttgccggatgcggcgtgaacgccttatccggcctacaaaatcatgaaaattcaatacattgcaagattttcgtaggcctgataagcgtagcgcatcaggcacgctcgcatggttagcgccattaaatatcgatattcgccgctttcagggcgttctcttcaataaacgcacggcgcggttcaacggcgtcgcccatcagcgtggtgaacaactggtcggcagcaatcgcatctttaacggtaacgcgcagcatacgacgactttccgggtccatagtggtttcccacagctgttccgggttcatctcgcccagacctttataacgctggatggagaggccgcgacgggactctttcaccagccagtccagcgcctgctcgaagctggctaccggctgacgacgctcgccacgttcgataaacgcatcttcttccagcaagccacgcagtttctcacccagcgtgcagatacgacgatattcgccaccggtgataaactcgtgatccagcggatagtcagtatccacaccgtgggtacgcacgcgaacaatcggctcgaacaggttttgctcagcattggtgtgaacatcaaacttccactggctgccgtgctgttctttgtcgttcagttcgctgaccagcgcgttcacccagcgggtaacggtctgctcatcagaaaggtcagcttccgtcaacgtcggctgatagataagctctttcagcattgctttcggataacgacgctccatacgattgatcattttctgcgtcgcgttgtactcagataccagtttctctaacgcttcgccagccaatgccggtgcactggcgttggtgtgcagcgttgcgccgtccagcgcgatagagatctggtactgatccatcgcttcgtcgtctttaatgtactgttcctgcttgcctttcttcactttgtacagcggcggctgagcgatgtagacgtgaccgcgttcaacgatttccggcatctgacgatagaagaaggtcaacagcagcgtacgaatgtggctgccgtcgacgtccgcatcggtcatgatgatgatgctgtgataacgcagtttgtccgggttgtactcgtcacgaccgataccacagccaagcgcggtgataagcgtcgccacttcctgagaagagagcatcttatcgaagcgcgctttctcgacgttgaggattttacccttcagcggcagaatcgcctggttcttgcggttacgcccctgcttcgcagagccgcccgcggagtccccttccaccaggtacagttcggaaagcgccggatcgcgttcctggcagtctgccagtttgcccggcaggcccgctaagtcgagcgcacctttacggcgggtcatttcacgcgcgcgacgcgccgcttcacgggcacgggcagcatcgataattttgccaaccacgattttcgcgtcggttgggttttccagcaggtattctgccagcagttcgttcatctgctgttcaaccgcgcttttcacctcagaagaaaccagtttgtctttggtctgggaggagaatttcgggtccggcactttcacggaaacgaccgcaatcaggccttcacgcgcatcgtcaccggtggcgctgactttggcttttttgctgtagccttctttgtccatgtaggcgttcagggtacgggtcatcgccgcacggaagcctgccaggtgagtaccgccgtcacgctgcggaatgttgttggtaaagcagtagatgttttcctggaagccatcgttccactgcaacgccacttcgacgccaataccgtctttttcagtggagaagtagaagatattcgggtggatcggcgttttgttcttgttcagatattcaacgaacgccttgatgccgccttcatagtggaagtggtcttctttgccgtcgcgcttgtcgcgcagacgaatggaaacgccggagttgaggaagctcaactcacgcagacgtttcgccagaatttcatattcgaactcggtcacattggtgaaggtttcgaggctgggccagaaacgcaccatggtgccggttttttcagtctcgccggtaaccgccagcggggcctgcggtacaccgtgttcgtagatctgacggtgaattttaccctcgcgctggataaccagctccagtttttggctcagggcgtttactacgctaacaccaacgccgtgcagaccgccggacactttataggagttatcgtcaaatttaccgcctgcgtgcagaacggtcatgatcacttccgccgcgcttacgccctcttccgggtgaataccggtcggaatgccgcgcccgtcatcctgtacagagacagagttatcggcgtgaatggtgacgataatttctttacagtgacccgcgagcgcttcgtcgatagcgttatctaccacctcgaataccatgtggtgcagaccggtgccgtcatccgtgtcgccgatatacatacccgggcgcttacgcaccgcatccagccctttcaggactttgatactggaggagtcataagaattgctcatcaacgtttctcgctcatttatacttgggttaatccgttattttacccttttccacggtaaacatcttgctattttcgtcgctcatgtctataacgtgttcagcactgatcgcgctgacaaagacctgactttgcgtcgcttttaagcggctggcaagcagcccgcgacgctcatcatcaagctcagaggcaaaatcatctatcaggtagagacaccgccgcccgctttcacgggtgaggaactctccttgcgccagacgtaaggcgcacatcaacagcttaagctgcccacggcttaaggtatcttccaccggcgcaccgtcggcgcgaatgcgtaagtccgctttgtgcgggccgtgcgcggtgtaggttagctggcgatcgcgttcaaaattacgttccagcacctcagcatattctgtctctttctcccagccgcgctggaaagagaaagtcagagaaaactcagggagaaattgcttacaggtatcagccatatcggccgcgataccggcgctatactccgcgcgccaggtgctgatttgctccgccagcgggatcagctctttatcccacgggcgtagctgttcgtaacgtgtcacctggcgcagcgccgcattgcgctgcttgagcaatcgcttgagattgctccaggcggtgaaaaatccgggttcgttgtgaaagcatccccagtcgaggaatgctcttctgtatttggggccgccgttgagtaaagtaaacccttctggcgttatcaactgcattggcatcaggtgcgccagttccgcgaccttatgcccgtctgtaccgtcgatgcggactttgctgtcgccctgtttgtctttggttaagccaatcgctgtctcgcgctcttcgccctgtaatcgcccgtggagaacaaacgcctcctgctcatggcgaatgacgcgaccaatctgcaaactgcgaaacgcccgaccatggccgagcgtatagatggcttccagcacgctggttttgccactgccgttggcacctaccagaaagttaaagccgggagataaggcgagatccgcggtttcaatgttgcggaaatcgcggatcaacaagcgggtgagggacattacagtctcattggcatgacaacataagccgcgctctggctggccgcatcttcaatctgcacgctggaaacgctatcggtcagcatcatgcggacgttttcgcatttcagcgcgttcagaacatccagcacataactgacgttgaagccgatttccatctccgcaccgctataggtaacgtcgaggatctcttccgcttcttcctgttccgggttgttggcggtgattttcagctggttttcgctgacataaagacgtacgccgcggaatttctcgttagagagaatcgccgcgcgagcaaacgcctgcttgagcagatcgcagccagcttccagatgtttgtccgggttcttcggcagaacgcggcgataatccgggaagcgaccatccaccagtttggaggtgaagataaagtcgccaacgtgggcgcgaatgttgttgctgccaatctgtacgcgcagcggattgtcgccgccgtcgagcatacgcatcagttcaatcacgcctttacgcggtacgatcacgctatggcttggcaaagattgaccaattggcatactacagaccgccagacggtggccgtcggttgccacggtgcgcagttcttcaccttcggtttcaaacagcataccatttaagtaatagcgaacgtcctgatgcgccatagaaaactgggtcgcttcaatcagacgcttcatcgttgcctgcggcagggtaaattcgacttcactctgccagtcatcgaggttcgggaaatccgccgctggcagggtagacaggctaaaacggctacgcccggagcgtaccagcatccgttcaccttccagctgcacggcaatttccgcgccttcaggcagaccacggcagatatcaaagaatttgcgcgccggaacggtcgtcgctcctggctcgtgtggctgaaccagcgcaacacgtgccaccatttccatctcgagatcagtaccggtcaggctcaacgtaccgtcagcaacctgtaacagcagattaccgagaatcggtagcgtaggacgaccacctaacggaccgctcacctgttgtagcggttttaataaatgctcacgttctacggtaaatttcataggtttagctactcaatgttctgattaaattactaaaatcttctttgatatcgtggctctcttcacgcaactgctcgatcttacggcaggcatgaagcaccgtcgtgtggtcacggccaccaaacgcatcgccaatctccggcagactgtggttagtcagctctttcgccagcgccatcgccatctggcgcggacgcgccacgctgcgggatcgacgcttggaaaggagatccgcgactttgatcttgtagtactccgccaccgtcttctgaatattgtcgatggtgaccagtttttcctgcaatgccagcaagtcgcgcagcgcctcacgcacgaagtcgatggtgatcgcccgtccggtaaagttggcattggcaatgacgcggttcagcgccccttccagctcacgtacgttagatcgtagacgcttggcgataaagaacgccacttcgcccggcaaacgaatgtcgttttcgtcggcctttttcatcaggatcgccacacgggtttccagctctggcggttcgatcgccacagtcagtccccaaccgaagcgggatttcaaacgatcctcaacgccgttgatctctttcggatagcgatcgctggtgagaatgatctgttgattaccttccagcagggcgttgaaggtgtggaaaaactcttcctgagatcgttctttattagcaaaaaactgaatatcgtcgatcagcagtgcatctacggaacggtagtagcgtttaaactcttcgatcgcgttgttttgcagggctttaaccatgtcctgaacaaagcgctcggagtgcatataaaccactttggcattcggcttgcgcgccataatgccgttacccaccgcatgcagcaggtgagttttacccagacccgtgccgccataaaggaacaacgggttataggcaccgccagggttatccgccacctggcgagccgccgcgcgcgccagttggttagatttaccttcaacgaagttatcaaacgtgtgtttgacgtttacgttagaacgataggtcggttctgccggggccgggacgttatcccaaccactgcgcgtagaaggcgcagcacgttgcggctgcgtttgcgccacctgtgcaggggccgcgacgttgctcgtcactgccgcttgtggcgtttgcgtcaccggtttggtgccgacttcaaaacgcagctgtggggcatccgctccgcagaaactggttagcagtccattgatattattaaggtacttgtcccgtacccaatcgaggacaaaacggtttggcgcgtacagggccagcgtgttatcgctcagttccgcctgcaatgggcgtatccacatactgaattctgtggctggtaactcatcctgcaatcgggcaagacactgctgccaaaggctaagactcacggcggactccactcgaacaaaagtcgataatgactaaggctgaaacattcatgattgttgacgtacgtcgaaaagaccctgcttgagggtgacgcacgaaccgctgtctgcggttatatgcccgatcaagatcctgcaaaacgatcgggaccgcggatcatagcctaaactgcgcaagagatcttctgtttctcacagattttcccgatttatccacaggactttccagaactcgctaagtgtaaacgatcctgccgcgaggcgggcacgatttacgccgcatattggaaaatttaatgaccatagacaaaaattggcttaatcgatctaataaagatccaggacgatccttgcgctttacccatcagcccgtataatcctccacccggcgcgccatgctggtttccactggtgtgaggtcgtacattttccctgcgaaaaggtgcggaaaagcgcggtaaataaggaaagagaattgactccggagtgtacaattattacaatccggcctctttaatcacccatggcttcggtgtccatcgtttcatttttcggcggatatccaataaagccattgaatttattcaagtttaggtagaaatcgccatgaaacgcacttttcaaccgtctgtactgaagcgcaaccgttctcacggcttccgtgctcgtatggctactaaaaatggtcgtcaggttctggcacgtcgtcgtgctaaaggccgcgctcgtctgaccgtttctaagtaataaagctaacccctgagtggttaagctcgcatttcccagggagttacgcttgttaactcccagtcaattcacattcgtcttccagcagccacaacgggctggcacgccgcaaattaccattctcggccgcctgaatagcctggggcatccccgtatcggtcttacagtcgccaagaaaaacgttcgacgcgcccatgaacgcaatcggattaaacgtctgacgcgtgaaagcttccgtctgcgccaacatgaactcccggctatggatttcgtggtggtggcgaaaaaaggggttgccgacctcgataaccgtgctctcagcgaagcgttggaaaaattatggcgccgccactgtcgcctggctcgcgggtcctgacttaatcggaagcgttggaaaaattatggcgccgccactgagccctggcagccgggtcctgatagccctcattcgggtctatcaacgcctgattagtccgctactcgggccgcattgtcgtttcactccaacctgtagtagctacggaattgaggcattgcgcaggtttggagtgataaaaggcagttggttgacggtgaaacgcgtattaaaatgccaccctttacaccctggtggtgacgatcccgtcccgcccggaccatttgataccagagaacactaacgatggatagccaacgcaatcttttagtcatcgctttgctgttcgtgtctttcatgatctggcaagcctgggagcaggataaaaacccgcaacctcaggcccaacagaccacgcagacaacgaccaccgcagcgggtagcgccgccgaccagggcgtaccggccagtggccaggggaaactgatcagcgttaagaccgacgtgcttgatctgaccatcaacacccgtggtggtgatgttgagcaagctctgctgcctgcttacccgaaagagctgaactctacccagccgttccagctgttggaaactagtccgcagtttatttatcaggcacagagcggtctgaccggtcgtgatggcccggataacccggctaacggcccgcgtccgctgtataacgttgaaaaagacgcttatgtgctggctgaaggtcaaaacgaactgcaggtgccgatgacgtataccgacgcggcaggcaacacgtttaccaaaacgtttgtcctgaaacgtggtgattacgctgtcaacgtcaactacaacgtgcagaacgctggcgagaaaccgctggaaatctccagctttggtcagttgaagcaatccatcactctgccaccgcatctcgataccggaagcagcaacttcgcactgcacaccttccgtggcgcggcgtactccacgcctgacgagaagtatgagaaatacaagttcgataccattgccgataacgaaaacctgaacatctctagcaaaggtggttgggtggcgatgctgcaacagtatttcgcgacggcgtggatcccgcataacgacggtaccaacaacttctataccgctaatctgggtaacggcatcgccgctatcggctataaatctcagccggtactggttcagcctggtcagactggcgcgatgaacagcaccctgtgggttggcccggaaatccaggacaaaatggcagctgttgctccgcacctggatctgaccgttgattacggttggttgtggttcatctctcagccgctgttcaaactgctgaaatggatccatagctttgtgggtaactggggcttctccattatcatcatcacctttatcgttcgtggcatcatgtacccgctgaccaaagcgcagtacacctccatggcgaagatgcgtatgttgcagccgaagattcaggcaatgcgtgagcgtctgggcgatgacaaacagcgtatcagccaggaaatgatggcgctgtacaaagctgagaaggttaacccgctgggcggctgcttcccgctgctgatccagatgccaatcttcctggcgttgtactacatgctgatgggttccgttgaactgcgtcaggcaccgtttgcactgtggatccacgacctgagcgcacaggacccgtactacatcctgccgatcctgatgggcgtaacgatgttcttcattcagaagatgagcccgaccacagtgaccgacccgatgcagcagaagatcatgacctttatgccggtcatcttcaccgtgttcttcctgtggttcccgagtggtctggtgctgtactatatcgtcagcaacctggtaaccattattcagcagcagctgatttaccgtggtctggaaaaacgtggcctgcatagccgcgagaagaaaaaatcctgattcggtgagttttcgctaaaataagggcggtcagttgaccgccttttttcttttcgtagggcggataagcaccgcgcatccgccacacaaagcaacaggaacatcatgagcgataatgacactatcgtagcccaggccacgcctccgggacgtggcggcgttggcatcctgcgcatctccggcttcaaagcccgtgaagttgccgaaaccgtgctgggtaaactgcctaagccgcgctacgccgattatcttccgtttaaagacgccgacggcagcgtgctcgatcaggggattgcgctatggttccctggcccgaacagcttcaccggcgaagatgtgctggaactgcaaggtcatggcggtccggtgatcctcgacctgctgttaaaacgcattctgaccattcccggcctgcggattgctcgccctggtgagttttccgaacgcgcgtttcttaacgataaacttgacttagcccaggccgaggcgattgccgatcttatcgacgccagtagcgaacaggcggcccgtagcgcacttaacagcctgcaaggcgcattctccgcacgggttaatcatctggtagaagccctcacccacttgcgcatttacgtcgaagcggcaattgatttccccgatgaagagatcgatttcctctccgacggaaaaattgaagcccagctcaatgacgttattgccgatcttgatgcagtgcgtgctgaagcacgtcagggtagtttgttgcgcgaagggatgaaagtggtgattgccggacgtcctaacgccggtaaaagcagcctgttaaacgcgctggcggggcgtgaagcggcaatcgtaaccgatatcgccggaactacgcgtgacgtgctgcgtgagcatatccacattgacggaatgccgctgcatatcatcgataccgccgggctacgtgaagccagtgacgaagtagaacgtattggtatcgagcgcgcgtggcaggaaattgaacaggccgaccgcgtgctgtttatggtcgatggcaccacaacagacgccgtggatccggcagagatctggccggaatttattgcccgtctgccagcgaaactgccgatcaccgtggtgcgcaataaagccgatatcaccggcgaaacgctgggaatgagtgaagtgaacggtcacgcgttaattcgtctcagcgcaaggactggtgaaggcgtggacgtgctgcgtaaccatctcaaacagagcatgggctttgacaccaacatggaaggcggcttcctggcgcgtcgtcgccacctacaggcgctggaacaggcagcggaacatctacaacagggcaaagcgcaactgttgggagcctgggcaggtgaactgctggcggaagagttgcgtctggcacagcagaacttaagcgaaatcaccggggaatttactagtgacgacctgctggggcggattttctccagcttctgtattggtaagtaaccgcgcttacgaggccgcattctgactgtcagatgcggcttcgcttcattgttaccactcctgttattcctcaaccctttttttaaacattaaaattcttacgtaatttataatctttaaaaaaagcatttaatattgctccccgaacgattgtgattcgattcacatttaaacaatttcagaatagacaaaaactctgagtgtaataatgtagcctcgtgtcttgcgaggataagtgcattatgaatatcttacatatatgtgtgaccagtaaatggttcaatattgacaacaaaattgtcgatcaccgcccttgatttgcccttctgtagccatcaccagagccaaaccgattagattcaatgtgatctatttgtttgctatatcttaattttgccttttgcaaaggtcatctctcgtttatttacttgttttagtaaatgatggtgcttgcatatatatctggcgaattaatcggtatagcagatgtaatattcacagggatcactgtaattaaaataaatgaaggattatgtaatggaaaactttaaacatctccctgaaccgttccgcattcgtgttattgagccagtaaaacgtaccactcgcgcttatcgtgaagaggcaattattaaatccggtatgaacccgttcctgctggatagcgaagatgtttttatcgatttactgaccgacagcggcaccggggcggtgacgcagagcatgcaggctgcgatgatgcgcggcgacgaagcctacagcggcagtcgtagctactatgcgttagccgagagtgtgaaaaatatctttggttatcaatacaccattccgactcaccagggccgtggcgcagagcaaatctatattccggtactgattaaaaaacgcgagcaggaaaaaggcctggatcgcagcaaaatggtggcgttctctaactatttctttgataccacgcagggccatagccagatcaacggctgtaccgtgcgtaacgtctatatcaaagaagccttcgatacgggcgtgcgttacgactttaaaggcaactttgaccttgagggattagaacgcggtattgaagaagttggtccgaataacgtgccgtatatcgttgcaaccatcaccagtaactctgcaggtggtcagccggttagtctggcaaacttaaaagcgatgtacagcatcgcgaagaaatacgatattccggtggtaatggactccgcgcgctttgctgaaaacgcctatttcatcaagcagcgtgaagcagaatacaaagactggaccatcgagcagatcacccgcgaaacctacaaatatgccgatatgctggcgatgtccgccaagaaagatgcgatggtgccgatgggcggcctgctgtgcatgaaagacgacagcttctttgatgtgtacaccgagtgcagaaccctttgcgtggtgcaggaaggcttcccgacatatggcggcctggaaggcggcgcgatggagcgtctggcggtaggtctgtatgacggcatgaatctcgactggctggcttatcgtatcgcgcaggtacagtatctggtcgatggtctggaagagattggcgttgtctgccagcaggcgggcggtcacgcggcattcgttgatgccggtaaactgttgccgcatatcccggcagaccagttcccggcacaggcgctggcctgcgagctgtataaagtcgccggtatccgtgcggtagaaattggctctttcctgttaggccgcgatccgaaaaccggtaaacaactgccatgcccggctgaactgctgcgtttaaccattccgcgcgcaacatatactcaaacacatatggacttcattattgaagcctttaaacatgtgaaagagaacgcggcgaatattaaaggattaacctttacgtacgaaccgaaagtattgcgtcacttcaccgcaaaacttaaagaagtttaattaatactacagagtggctataaggatgttagccactctcttaccctacatcctcaataacaaaaatagccttcctctaaaggtggcatcatgactgatcaagctgaaaaaaagcactctgcattttggggtgttatggttatagcaggtacagtaattggtggaggtatgtttgctttacctgttgatcttgccggtgcctggtttttctggggtgcctttatccttatcattgcctggtttagtatgcttcattccgggttattgttattagaagcaaatttaaattatcccgtcggctccagttttaacaccatcaccaaagatttaatcggtaacacctggaacattatcagcggtattaccgttgccttcgttctctatatcctcacttatgcctatatctctgctaatggtgcgatcattagtgaaacgataagtatgaatttgggttatcacgctaatccacgtattgtcgggatctgcacagccattttcgttgccagcgtattgtggttaagtagcttagccgccagtcgtattaccagtttgttcctcgggctgaagattatctcctttgtgatcgtgtttggttcttttttcttccaggtcgattactccattctgcgcgacgccaccagctccactgcgggaacgtcttacttcccgtatatctttatggctttgccggtgtgtctggcgagttttggtttccacggcaatattcccagcctgattatttgctatggaaaacgcaaagataagttaatcaaaagcgtggtatttggtagcctgctggcgctggtgatttatctcttctggctctattgcaccatggggaatattccgcgagaaagctttaaggcgattatctccagtggcggcaacgttgatagcctggtgaaaagcttcctcggcaccaaacagcacggcattatcgagttttgcctgctggtgttctctaacttagctgttgccagtagcttctttggtgtcacgctggggttgttcgattatctggcggacctgtttaagattgataactcccacggcgggcgtttcaaaaccgtgctgttaaccttcctgccacctgcgttgttgtatctgatcttcccgaacggctttatttacgggatcggcggtgccgggctgtgcgccaccatctgggcggtcattattcccgcagtgcttgcaatcaaagctcgcaagaagtttcccaatcagatgttcacggtctggggcggcaatcttattccggcgattgtcattctctttggtataaccgtgattttgtgctggttcggcaacgtctttaacgtgttacctaaatttggctaaatccttcaagaagccagccattcgctggcttcttgcctctcaggaaatcacttatgtccaaatggcaactcgcctgatcctccttcaccacgtatgctttgcgtcaccttactatcaggacgctttagcccatgtcccgctttttgatttgtagttttgccctggttttactttatcccgccgggattgatatgtacctcgttggtttaccgcgcatcgccgccgatctcaatgccagcgaagcgcagttgcatattgcgttctccgtatatctggcggggatggcagctgcgatgttatttgccggtaaagtggccgatcgtagtgggagaaagccggtcgccatacccggcgcggcgctatttattattgccagcgtgttctgtagtctggctgaaaccagcacgttatttcttgcaggccgatttctacaggggttgggcgcaggctgttgttacgtagtggcgttcgctattttgcgcgacacgctggatgatcgacgtcgggctaaagtgctgagtttactcaacggtattacctgcatcattccggtgttagcgccagtgctcggacatctgattatgcttaaattcccgtggcagagtctgttctgggcgatggcaatgatgggcatcgcggtactgatgttgtctttgtttattttaaaagaaacgcgcccagcggcccccgcagctagcgataaaccacgagaaaatagcgagagcctgcttaaccgttttttcctcagccgtgttgttatcaccaccctcagcgttagcgtgatcctcactttcgtcaacacgagtccggtattgctgatggaaatcatggggtttgagcgcggtgaatacgccaccattatggcgctgaccgctggcgtcagcatgaccgttagtttctccacgccatttgcgctgggaatttttaagccacgtacgttgatgatcaccagccaggtgttattcctggcggcggggatcactcttgccgttagtccttcccatgcggtttctctgtttggtatcacgctgatttgcgccggtttcagcgtaggttttggtgtggcgatgagtcaggcgttagggccgtttagtttacgcgcgggcgtagccagcagcaccttaggtattgcgcaggtttgcggtagcagtctgtggatttggctggcagcggtggttggtatcggcgcatggaatatgctgatcgggattctgattgcctgtagcatagtgagcctgttgctgattatgttcgtcgcgcctggacgccccgttgccgctcatgaagaaatccatcaccacgcttgatctcaatctgctgctttgtctgcaactgctgatgcaggagcgcagcgtaaccaaagcggcgaagcggataaacgtgacacctagcgcggtgagtaagagcctggcaaagttaagagcgtggtttgacgacccgctctttgtgaacagtccgctgggtctgagccccacaccgctgatggtcagcatggagcaaaatctggcggagtggatgcaaatgagcaacctgctgctggataaaccgcaccaccagacaccgcgcggcctgaagtttgagctggcggcggaaagtccgctgatgatgatcatgcttaatgcgctgagcaaacagatctaccaacgttacccgcaggcgaccatcaaattacgtaactgggattacgattccttagatgccattactcgtggtgaagtggatatcggtttttccggtcgcgaaagccatcctcgcagccgggagctgttaagcagcctaccgttagccattgattatgaagtgctgtttagtgatgtgccctgcgtctggttacgcaaagatcatccggcactgcatcaaacgtggaatctggacaccttcttacgttatccgcatatcagcatttgctgggaacagagcgatacctgggcgctggacaatgtgttacaggagctgggacgcgaacgcacgattgctatgagcctgccggaattcgagcagagtctgtttatggcagcgcaacccgacaatctgctactggcgaccgcgccgcgctactgtcagtactacaatcaactccatcaactgccgttggttgctcttcctctcccgtttgacgaaagccagcaaaaaaagctggaagttccttttaccctgctgtggcataaacggaacagccataatccgaagatcgtctggttacgggaaaccattaaaaacctttacgcgagcatggcataaccgaatcgtatgaaacgcgacccaatttcacaataaaatgtaaaaaagttgtaataagcttgtctgaatcgaacttttagccgctttagtctgtccatcattccagtaaatgattactcttgtattcataatggaccattaagcatggagcgaaaaatggcgactcactttgcccgagggattttaacggaaggacatctgatttctgttcgtctcccctcccagtgtcatcaagaagcccgaaacattccccctcatcgtcaaagccgttttctggcgtccagaggtttactcgcagaactgatgttcatgctgtatggcattggcgaattgccggaaatcgtcaccctgccgaaaggtaaaccggttttcagtgataaaaatttgcctagcttttccatttcctatgccgggaatatggttggcgtggcgttaacaaccgaaggtgaatgtggcctcgatatggaactacagcgtgcgacgcgcgggtttcatagcccacacgcgcccgataaccacaccttttccagcaatgaaagcctatggatcagtaaacaaaacgatcctaacgaagcgcgggcgcagctcatcacgctgcgccgaagcgtgctaaaactaaccggtgatgttttgaatgacgatccgcgcgatctgcagctgctgcccattgccggacgcctgaaatgtgctcatgtaaatcatgtagaagcgttatgcgacgcggaagacgtgctggtgtggtccgtggcggtcacgcccacgattgaaaagctcagtgtctgggagttagatggcaaacacggctggaaaagcctgccggatattcacagccgcgccaacaatcctaccagccggatgatgcgttttgcccaactctctaccgtgaaggcttttagcccaaattgatagacaaccacaggagtcatcatgtctgaaaaattgcaggtggttacgttactggggagcctgcgcaaaggcagttttaatggcatggttgcacgtaccctgccgaaaattgctccggcgagcatggaagtcaatgcgttaccatccattgccgacattcccttgtatgacgctgacgtacagcaggaagaaggttttccagcaacggttgaagctctggcggaacagatccgtcaggctgacggtgtggtgatcgtcacgccggaatataactacagcgtaccgggtgggctgaaaaatgccatcgactggctttcccgcctgccggatcaaccgctggccggtaaaccggtattgattcagaccagcagtatgggcgtgattggcggcgcgcgctgtcagtatcacctgcgccagattctggttttcctcgatgcaatggtgatgaacaagccggaatttatgggcggcgtgattcagaacaaagttgatccgcaaaccggagaagtgattgatcagggtacgctggaccacctgaccgggcaattgaccgcatttggtgagtttattcagcgagttaagatctaaataaaaaacccgccagcaatcatgcatggcgggtttttaacgcgctatcgattttagtgagcgtcgataaagacaatcttcaggataaacagcagcgcaacgatgattacgcacgggcttagatcacgcagacgtccggtaccgattttcatcacgcagtaggagataaagcccagcgcgataccttcggtaatgctgaagctgaacggcatcatcacggcggtaataaacgccggaacagattcagtaagatcctgccagttcacgcgtgccagactggaagtcatcagcacgccaacgtaaatcagcgcaccagctgcagcgtagcctggcaccatccccgccagcgggctcagaaagataaccagcaggaacagcagaccaacaaccactgccgtcagaccggtacgaccgccaacgcttacgccggaagaggactcaatataagccgtaacggaagaagtaccgataaagctaccggtcacggaagagatactgtcgacatacagcgcctgcttcatgcgcgggaatttccccttctcatccgccagacctgctttatcggtcacgccaatcagcgtaccggaggagtcaaacaagttgaccaacatgaaagagaaaatcacccctgccagcccgaggttaaagctcccggctaaatctacatgacccacaactgtcattacgctcggcggcgcagaaacgatgccattgtagtgcacatcacccagcatccagcccagcagcgtcgtcaccacgatagaaaccagcaccgctgcgtgaatgttgcggctggccagaatagcaatgatgaagaagccgaggatacccagaagtacgctgtgagaagtcagattaccgatgctcaccagcgtttccgggttagcgacaatcacacctgcgtttttcagccccatcatgccaatgaacagaccgataccgctggtaatacccacacgcagactcaccggaatgttggctatcatccagtagcgaacgcggaaaatcgtcagtaacagcagacctatcgcgccccagaagattgcgcccatcccgacctgccacggcaagcccatcgcctgtacaacgacaaaagcgaagaacgcattcaggcccatagcgggtgccagtgcaactggcaggttagcaaacagtcccatcataatactgccgaatgcagcgatcagacaggtagtgacgaagacggcgctggtatccatgccagcaacgccaagaatttgcgggttaacaaaaacgatgtaaaccatcgtcaggaaggtggtaaaaccggcgatcacttcggtccgtgccgtcgtgccatgttcgcgcagtttaaacacgcgttccagcatcccctgaccagaagtctgggtggtatgttgatgactcattatctatttccgaacaaggagggaaaatccgtcgctatcgtataccaaaatgcgacaataggcgcgtttgtgagagacttttttattggatttacttatacggcaacgattgcgttgcgcaaatcggctctacgaaaacgttaaactgattaaaaaggaaaggcatgtcccggatagaagcggtatttttcgactgcgacggtacgctggtcgacagtgaagtcatttgctctcgcgcatatgtaacgatgtttcaggaatttggtattacgctcgatcctgaagaggtattcaaacgtttcaaaggtgtaaaactgtacgaaattatcgatattgtttcccttgaacatggtgttacgttagcgaaaacagaagctgaacacgtttaccgtgcagaagtcgctcggctgttcgatagtgaactggaagccatcgaaggggctggagcgctcctgagtgcgatcactgcgccaatgtgtgtggtatctaacggcccaaataacaaaatgcagcattctatgggcaagctgaatatgttgcactacttcccggataaactgttcagcggctacgatattcagcgctggaagccagacccggcgttaatgttccatgcggcaaaagcgatgaatgtaaatgtagaaaactgcattctggttgatgacagtgttgccggtgcacaatctggtatcgacgcaggtatggaagtgttctacttctgcgccgacccgcacaataagccgatcgttcacccgaaagtcaccacctttacccatcttagccagttacctgaactgtggaaagcgcgtggttgggatattacggcataattcttcacactcccttcacttaccccgcttaaattggcgctcaaaggtaagtaaagggagtttgatatgtctgttagtcgtcgggtaatacatcacggactttattttgcagttttaggaccgttaattggtgttctgtttcttgtcctctacatattcttcgcaaaagaaccgctggttctttgggtgataatacatccaatttttctcttattgagcataactacgggagctattcctgcgttgttaaccggtgtaatggttgcctgtctgccggaaaagatcgggagtcagaaacgttatcgttgtctggctggtggcataggtggcgtcgttatcaccgagatctattgtgcagttattgtacatattaagggcatggcttccagcgagttgtttgaaaacattctttctggtgacagtctcgttgtccgcatcattcctgcattgctggcaggtgtggtgatgagcagaatcattacccgtctacccggattggatattagttgtcctgaaacagactctttaagttaagcgggatactttatctttgggctactcaaaagcagacaggatgtttctatgactcaaaatatcaggccgttaccccaattcaaatatcatcccaagccactggaaacaggcgcatttgaacaggataaaaccgtagagtgcgattgctgtgaacaacagacgagtgtttattacagcggtcccttttattgcgttgatgaagttgaacatctctgtccgtggtgtattgcggacggttctgctgctgaaaagtttgcaggtagttttcaggatgatgccagcatagaaggtgttgaatttgagtatgatgaagaggacgaatttgccggtattaagaacacatatcctgatgaaatgctgaaagagttggttgaacgcacgccaggttatcatggatggcagcaggaattctggctcgcgcattgtggcgatttctgtgtttttatcggctatgtgggctggaatgatataaaagatcgcctcgatgaatttgccaaccttgaagaagattgtgagaatttcggtattagaaattctgatctagctaaatgcctgcaaaagggtggtcattgtcagggttatctcttccgctgtctccactgcggcaagctgagactgtggggtgattttagctaattatttaaataatgagaacaggccggagcgtaattcacacatccggccttatttcttaagcttaaccgagtgctaattctgcggcagcggctttatcagcgattaccatcaggctaggatgcagctgcaacacggaagctggaacatcttcggtaaccggaccttgcagaacatttttcagtgcctgcgctttacccgcgccgctgacaattatcagcaagtttttcgccgccatgatgcttttcggccccatcgtcacgtagctgtcaggcactaagctaaagtcgccgcccaactcgccatgcgccacaatatcaaccatctctccctggatcgggaactccacggtttgctcatggaaatgggtcgtattcggcaaattgccacaaaaatgaccatctgcacctaatcccagcaccaccaaatccagtccgccttcacgcgccagtttctgatcatgctcgcggtagttatcaatagtgagcttctggatattctcttctttgatccccgcaggggtgaaaaacagattacgcagattggtaatcgttacgccttctccctctttgccgcgaaatggaatttcatcaaaattatagaaatagcagttatcgtaccagggcttacctttaaccagggtggtgaggtattcatacatgcctttgggcgtgctaccggcggtaattgccaggttaacacgacgcgtcttgctcatataaccaagcagatggtgtgccgcgacacggctcatttcctggtaatcttcggtaatgattaatttcatcttaatgccttattttatttaaataatttctgtacaaaggctgcataggctggtcgccagacatccatttcatggttcagacccggatattcctggtaatcaaagttaatttttttctgctcaagctcagttttcagcccggcgatatccttgccggttacgacatctttatcccccacaaccacagtaaaattacgtagttgctggttgatagctgccggatcgttcagtcgggccgcgacaccttcatccggtacggttgtcgtggtaacaccactgaatgtggccagccagccaaagctttccagatgattcattccggaaaccagcgcctggtacccgccttgactaagccctgccagcgcgcggccatcggcatctttacggacattaaaacgcttgctaatcagcgggataatatcgttcatcagttcgcgatctgccgctttagcattcagcggataaaagactttacgtctttcctgaggcacgaaatcttcgggaataatgcccttcgcatcggtttctgtatccgggatcaccaccagcatcggtttaattttcccttcagcaagcaggttatccatgatttgcgggatacgcccctgatcgatagcggaacgtccggtatcaccaaagccgtgatagaaatagagcactggcaaaggctcgcccatgccggtgtatcctggcggggtccagacatacatctgacgttcagattgcaatgcgttggagtggtaagttatggcgatcaaatcaccatgcgcaacagaacgcgtatccagataactgcctggcaccagaatcatactggagttaacctggcgctgaggattagtcattgcggtgcctgtatcaatgctgcgtacaccatcaacattgaaaaaatactcgtacaggttgcctttcaggataggtgtgcgccagctccagactcctgcttcgtctttggtcatcgggtgaatattgtccggaaccggaacacccaccactacagagacattttttgccccaggggcaaagtagcgaaaggtcacgctgttatcggcattgacctgagtcacatactgtttcaccgggatagtgggtgccgggctggctggcatatccgctgctatggcccactgagcagaaataccgctggcaatagccagcgttaaagcagcaatttttatattcatcgtaatattcctttcattaagttccattaccaccagatttcagcctgggcaccgacagcaaactggtcgtctttattgtcttcaaaggtgaagccatccagttcgttttccagggctttgatatacgtggcgtagaaacgaatttccggacggctggtcaacatactggtattgactttaaaggtatggaagagcgtggttttataaccagactcattaaatttattactattcgcatctttgttttgctgggtgaaatagcccagttcaacacctgtctggttatattggtcccaaatataggccgggcgaacaaccgcacgaatagattcgaaatcagagtgggcgcctgtttcgtagctatatatatcgttaccgaaggagtaaacaatcgcgttagctacaatgaaatgatcgccaatataggcttcgccctggctagtcagacgtaccgctgttccgccggtgtgatcaccataataacgaccattaaaggtggtaaatggacttgcgccagcataacggccaaagttactggcgatagagttattcgcgaccaggaaggagaattcgttgaagccacctttatcaaatttctgcgttaaagatgtgccaaacatccaggtatctttccagtcataatacccgttattatcctgattatctttttcgcttgcgctttcgtttgccgtgacataacgaccacttaccattaaggtggctttatcccataacgggatatctttatagcgtaaatcaatggtattggtattaatctgctgtttgttttgcaggctgcgatcgtaatcatcgacatcttcgcgaaccagcgcgatatcaattttacccggaccgactttccagttttccagacctacacccgctgcggcatcagtacgctgcgttttccagtcaagcatctggatttcaattttcggcgcaccgtgtttacccacccagaaatcagcctctggcgcaaagggcaggaaacctttggtggtaacgtacatatcggagaactgcatatagttctcgccaccggcgttatcgccaaaccagccggtagagtactgctgaccaacgttaccatccatcatcacaacggcatcaacccgtttgccgttttcgttgtagacacgttgttttaactgcaaatcaaaccagccggagtattcgttaccaaagcggcccagagaaccaatcgcccaacttttaggactaccatgagaggcggtcccccaaccagaacggtaatagccgttgtaactaaagccaatttcatctttcacaaatttactgaaatctttcagagtcatggaagaataaatgctgcctgtctcactggcatttttctcttcatttttgaccagtacagcatcaggttttgcggcactactggtcgggaacggattggcggcatacccttgatcattcgtacttacgctacgattcaccgtcgctggcgtatactttttcttctcttcatctttatactttttgagttcgctttgcgtttctcttaacgccttttctaataactcaaggcgttgttccaccgttaaactttcagccaaactttgtgcagaaaaggctaacggtgccattaataagatggcagaggtaataagatttcgtctaaacataatatccctttatggtgcaaagaaagaattaacgcatcgcatccagactgttctgaatgcgacgataattaaggtgctttaatggttattttttttaaactcagcccccgcgtcttgatcacctctgcataccatccgaagcttttcttgcgtgttcttgtgaggcttccttcgccattatcatcacgatccacataaataaagccgtagcgcttagacatttgactatgagatgcactgactaaatcaattggcccccaactggtgtaccccataatatccacaccatcggcaatcgcttcatttacctgtaccaggtgatcgtttaaataggcaattcgataatcgtcctgtatgctaccatccgcttcaacgctgtcttttgcgcctaatccgttctcgacaataaataacggtttttgataacgatcccaaagcgtatttaacagaacccgtaatccaaccggatcaatttgccacccccactcactacttttcagatgcggattggggatcatattcagtatgttgccctgcgcatttttattaatgctttcgtcgtgggaaacacaaccagtcatgtaataactaaaagagatgaaatcgacggtatgttttaaatcttctgcgtcactttcagtcatctcaatggtgatattgtggtcgcggaagaaacgctgcatatagccgggatactggccacgcgcctgaacatcaccaaagaacatccagcgccggttctcttccatggcctgcaacatatcctgtggctggcaggtgagggggtaaaccagcccaccgagaagcatattgccgattttcgcttcggggagcaggctatgacaggctttaactgcccgcgcactggcaaccagttgatggtggatagcctgataaacttccgcctcgccactctcttctgccagccccacgcccgtgaatggcgcgtgtaagctcatgttgatttcattaaacgtcagccataacgccactttatgttggtagcgagtaaagaccgtgcgggcgtaatgctcgaagtgatcgatgaccgctcgattagcccaaccgccgtagtttttcaccagcccatatggcatttcgtaatgggataacgttaccagcggcttgatccccgcctgcgccatttcatcaaacagccgatcgtaaaacgctaaccccgcttcattcggttcgacttcgtcgccctgagggaaaattcgcgcccaggcaatggaaatacgcagacaggtgaagcccatctcggcaaataacgcgatatcttccgggtaacggtgataaaaatcgatggcgacatctttgatattctctttccccaggatgcgcggttccatttttcccattacgccatgaggctgtaaatcactggtgctgatccctttgccatcttcctgccaggcaccttccacctgattggcagctgttgcgccaccccaaagaaatgtttctggaaatgctttcataattaactccttttatcgttagcgaatgatggataacagcggttcacctgcgcttatctgcgccgtgccgtggggtaatacgtccgtaaaatcatcgctattactgattaataccggcgtcgtcagatcaaatccggcctcgcgaatagcagggatatcaaaagaaatcagccgatcgcctgtattgaccttgtcacccacgttgacgtgagcggaaaagaatttgccgtccagttttacggtgtcgataccgacatgaatcaggatctccacaccatcatcactctcaatgccaatggcgtgtaatgtggcgaacaagctagcaattcgacccgcaaccggagaacgcacttcaccaacgctgggcagaatggcaatacctttacccaacaggccactggcaaacgtggtatcagcgacgtgaatgagcggcacaatctctcccgtcatcggactacagataccgccctgctcaggtggtgtaataacctctggtgttttctcttgcggggcaccctgcgctggctgacgtttagcggtgatgaaatgaagcatcaccgtaccgacaaatgcgcaaccgatggcaatgacaccgccaataacgctggcccagacggtgaaatcaattcccgtactcgggatggtttgcatgaaggtgaaaatacttggcaaaccaaaggagtagactttcgtttgcgcgtagccaataatggtggcccccaaagccccactgatacaggcgataacaaaggggtacttacgcggcaggttgacgccatataccgctggttcggtgataccaaacagactcgtcaacgccgcacttcccgccaccacttttttctgcgcatcgcgttcgcagaggaagacgccgagcgccgccccgacctgcgccataatggcgggcattaacagcgggatcatggtgtcgtagcccagcacggtgaagttattgatacacagcggcaccaggccccagtgcagtccgaacatgacgaagatttgccagaagccgcccattaccgcgcccgcaaatgcaggaaccgcctgataaagccagagataaccggcggcaatcagttcgcttatccaggtacttagcggccccaccagcagaaaggtgacgggtgtgataaccatcagacatagcaatggtgtgaagaaatttttgattgcgctcggtaaccacgcattaagtcggcgttccagaatgctgcacaaccaggcagaaaaaataatgggaataacgctactgctgtaattcaacaatgtgaccggaatacccaggaaatccagccccagcgcatccgctttttgcccgttctcgaaagcagtcagaattaatggatgcactaacgctccaccaatcaccatggcagtaaatggattaccgccgaagcgtttccccgcggtgtatcccaggattatcgggaagaaccaaaacaaggcatcactggcgctgaataaaattaaataagtaccactttgttcggtcgtccactgaaaagtgagcgccagagccagcatacctttcaagatcccggttgccgccatcaaaccgatcagaggcgtaaaaataccactaataacataaacaaagcggtttagcagattacctttatcatcattttccggtgcctgttgcgctttttcgtcaaggcctgccacactgttaaccgccaggaagacatcggccacatggttacctatgaccacctgaaactggccaccgctttccaccaccataataataccgggggtctttttcagtacctctgcttgcgctttgctttcatcctttaatttaaaacgtaatcgcgttgcgcaatgcatcagactcacaatgttatctgcgcccccgactcctgcgactatttttctggctaactccgtcataacttgccctctaccgctttgcggcaaaactccaaaaaaaaacctgaaaaaaacggcctgacgtgaatcaagcaatttttttcaggttttgcccgcttagtgcggtaacaatcctttactcagtaataatatttcagtgttctttgcgcacgcgctctatatttatggctaaaaacataatctctgcgggactaattttacgttgatactgcaaaccaataaaaatggcgatccgttccgcacattgccatgcttgcgggtaattttgttttactgcttgttgtaaactttcatcactatcgttaatactagcatgttcaagaatacgccaggataaaaacttcagatgtgtaaccagtcgctgataactcaagctttcttcctggtaattaaggctgaactgaaattttattaattgcagcatttcgcgcattaactgcgtgacacctgcaacatcctccatatttccgctcatttgggcactgaccagatgcatggcaataaagcccacttcatctttcggtaactgcacgcccaaccgtttatcaataatggttaacgcttcttcccctagctggaactctttcgggtaaagccgctggatatcccacagcaacgggttgggcagcaacacgttttgctgaaagcgtttaatcgcaaactggcaatggtcagttaggctgatataaatactgtcctgtaattttcccaagcgctcctgcgctaaagagataatacgatcacaggttgccatcacctcaagaggaatatgacttaagagttcgcttaatcgcccgttcagttcatgactgctcaaggcatactctttttctattccactactgttaattctttcgccagcgcgtttttgaaagccaattccgcgccccatgacgactttttcccgctgttgatcatcaataaccaccacaacattattgttgagaattttggtgatttgcatgttcatagcaaggaccttttttataaacaaaaaaacccgacttcaccagtattctctggttatgtcaggttttgcctgcgaatgcagtaacaatccagtcatttattaatggtttttataacgaacatccaggttcggaaattaatttaattgcgtgcagagaaaatagcaatgcgctattgataaaaatatgaccatgctcgcagttattaactttgtgtaattttaggaatttataaagttatatataacaaatcccaataattaagttattgggatttgtctggtgaattatttgtcgctatctttccccgccagcagtttatccagctcatcgccaccgacgtgacggaaatcctgccccttcacgtagtagaagataaactcacaaatattctggcagcggtcgccaatacgttcgatagaacgcgcgcagaacagcgcagtaagtacgctcggaatggtacggctatcttccatcatgtaggtcatcagttgacgaacaataccttcgtattcctgatcgacttttttatcttcacgataaatacgtaccgcttcgtcaatgtccatccgcgcgaacgcgtccagcacgtcgtgcagcatctggatggtatgacggcccaggctctccagacttaccagcaacggctgatgctgctgggagaatttctccagcgcagtacggcagattttgtccgccacgtcgccaatacgctccagctcggcaatggttttactgatcaccataaccagtcgcaggtcgctcgccgtcggctgacgtttggcgataatgcgcacgcaggcttcatcgatcgccacttccatcatgttgacgttcttgtcgccttcgatgacgcgcttcgccagatcgctgtcctggttatgcatcgcggtgattgcatcagaaagctgctgctccaccatgccgcccatggtcatcacctgcgtgcggatactttccagttcggcgttgaactggccggaaatatgtttattaagattgagactgtccataacgcactcctgaatcaaccgtaacgaccggtgatgtagtcttctgtttgtttcttcgctggcttggtgaacagatcgtccgtgttgctgaactcaatcaattcgcccaggtacataaacgccgtgtggtcggaacaacgcgcagcctgctgcatgttgtgggtgacgatcaccacggtgtaatcctgcttcagttcggtgatcagctcttcaatacgcccggtagagatagggtcgagcgcgctacacggttcgtcgagcagcagcacttccgggcgaatggcgataccacgcgcaatacacagacgctgttgctgaccaccagagagagagtaaccgctctggtgcaatttatctttggtttcgttccacaatgcggctttggtcaatgcccactgcacgcgctcgtccatgtcggcacgggagagcttctcaaacagacgaacgccaaaagcgatgttgtcgtagatggacatcggaaacggcgtcggtttctggaacaccatgcccactttcgcacgcagcagtgcgatatcctgagagttggtcaggatgttgtcgccatcaagcagaatttcaccttccgcacgctgctccgggtacagttcaaacattttgttgaaggtacgcagcagcgtgcttttaccgcagccggacggcccgataaacgccgttacctggtttttagcgatatccaggttgatgtttttcagggcatggaatttgccgtagtagaagttcaaattacgaacctgaattttactcggggcagtttcaaccatactcattgcaatcttttcctcatcgtgcctgatgcacttcgctaatcaggcttaccgtaggccggatcaggcgttcacgccgcatccggcaaagtgttaaccgtgtacagagtcaaaaaggcgctcggtcggtcccctcgcccctctggggagagggttagggtgaggggaaaaccgtgtcagcaatatcaaccgtgtttattcttcgcaaaaacaacgcgcgccagaatgttcagcagcagtacgcacagggtaatgatcaataccccggcccaggccaattgctgccattccgcaaacgggctcatcgcaaacttaaagatcgtcaccggcaggttggcgatcggctgcatcatgtccgtgctccagaactggttggagagcgcggtaaacagcagcggcgcggtttcaccagcaatacgggcaatcgccagcaggataccggtcataatcccggacacgctcgctttcagcgtaatcgcagagatcatcttccacttcggtgtacccagcgcataagccgcttcacgcaggctgtacggcaccagtttcagcatgttctcggtggtgcggataacaatcggcacctgcaacaacgccagggcaatcacgcccgcccagccggagaagtgctccatctgcgccaccacaatggtgtaaacaaacagaccaaccacaatgctcggcgcagagagcagaatgtcgttaatgaagcgaatcacttctgccagccaggatttacgaccatattccgccagataaatccccgccataatgcccagcggcgtaccgaataccgtggcccacaaaattaacagcccgctacccgccagagcgttcgccagaccaccaccttccgtattgggcggcggcgtcatttcagtgaacagcgccaggctcataccgtcgataccgcgagtgatggtggacattaaaatccagatcagccagaacaggccgaaggccatcgtcgccatgctgagcgtcagcgcaatacggtttttgaggcggcgacgcgcctgcattttgcggcgagattcagccagcgccgcagtggtttgcatttcaaccatagccattagcgtgccccctcattcttagccaggcgcataatcataaacttgcttgcggcgaggacgatgaaggtaatcacaaacaggatcaggcccagttccatcagtgcggcaacgtgcagaccggattccgcttccgcaaattcgttcgccagcgcagaggtgatactgttgcccggcatatacaggctggcgctgtcgagctggtaggtgttaccgatgataaaggtcaccgccatggtttcaccgagcgcgcggcccagccccagcatgatgccgccgataacaccatttttggtgaacggaagaacgatacgccagataacttcccaggtggtgcagccaataccgtaggcgctctctttcatcatcaccggggtttgttcgaacacatcacgcattaccgccgcaatgtacggaataatcatgatggcgaggatcacgcctgccgcgaggataccgataccaaatgcggggccagagaacagcgcgccaacaatcgggatattgctcatgatattgccgaccggctcctgaaagtaaacggcgaacagcggcgcaaagataaacaggccccacatgccgtaaacgatacttggaatggctgccagcagctcaatggcgatacccagcgggcgtttcagccagccaggcgcaagctcagtcaggaacagggcgataccgaaactcaccgggacggcgatcagcagcgcgataaagctagtcaccaacgtaccgtagatcggcaccagcgccccgtagatatcgttcggtgcatcccactctttggtccataggaaagccagaccaaatttctgaatgctcggccaggaggagatgatcagagagacaataatgccacccaacatcaatagcacaatcagcgccgccagttttaccagcacgctgaaaattatgtcgccctttttacccggtgggttaaaagcaggcttggttgcagccataagttactcttcagttaaacgcgtttacaaagtcattttgtaatgccggatgcggcgtaaaacaccgtacccggcctggagttttattagtacagcggcttaccgctactgtctttaatattggtcttccacgcagcgcgaacctgttcaactacactatccggcaggctggcgtaatccaggtcgttcgcctgtttagccccggttttgtacgcccagtcgaagaatttcagcacttctgtgccttgttctggtttcttctgatctttgtggatcagaatgaacgtggtagaggtaataggccatgcatcttcgcctttctggttggtcagatcctgagcgaaggttttgctccagtctgcaccttttgctgcattagcgaagttttcttcggtcggactaaccggtttaccatcagcggagatcagtttggtgtacgccaggttgttctgcttcgcgtaagcatattcaacataaccaattgcacccggcagacgctgaacgaacgcggcgataccgtcgttacctttaccgcccagaccgatcggccattttacggtagagccagtaccaacgttgtttttccactcttcgttcactttcgccaggtagctggtgaagacgaaggaagtcccggagccatctgcgcggcgtactacagcaatgttttgactaggcagtttcagacccggattcagtttggcgatggcttcatcatcccacttcttgattttgcccaggtagatgtcgccgagggttttaccatccagcaccagttcgccagacttcagccctggaatgttaaccgccagcaccacgccgccaatcacggtcgggaactggaacagaccttcctgagccagtttttcgtcagacagcggcgcgtcagaggcaccaaaatcaacggtattagcgataatctgttttacgccaccggaagaaccgataccctggtagttaactttattaccggtttctttctggtaagtgtcagcccatttggcatacaccggcgcagggaaggttgcacctgcacctgtcaggcttgcttctgcaaacacagagaaagcactcatgcttaaggtcgcggcgacaacagttgcgacggtggtacgcataactttcataatgtctcctgggaggattcataaagcattgtttgttggctacgagaagcaaaataggacaaacaggtgacagttatatgtaaggaatatgacagttttatgacagagagataaagtcttcagtctgatttaaataagcgttgatattcagtcaattacaaacattaataacgaagagatgacagaaaaattttcattctgtgacagagaaaaagtagccgaagatgacggtttgtcacatggagttggcaggatgtttgattaaaaacataacaggaagaaaaatgccccgcttacgcagggcatccatttattactcaaccgtaacgctttttgccaggttacgcggctggtcaacgtcggtgcctttgatcagcgcgacatggtaagccagcagctgcagcggaacggtgtagaagatcggtgcaatcacctcttccacatgcggcatctcgatgatgtgcatgttatcgctacttacaaaacccgcatcctgatcggcgaagacatacaactgaccgccacgcgcgcgaacttcttcaatgttggatttcagtttttccagcaattcgttgttcggtgcaacaacaataaccggcatatcggcatcaattagcgccagcggaccgtgtttcagttcgccagcagcgtaggcttcagcgtgaatgtaagagatctctttcaacttcaatgcgccttccagcgcgattgggtactgatcgccacggcccaggaacagcgcgtgatgtttgtcagagaaatcttctgccagcgcttcaatgcgtttgtcctgagacagcatctgctcaatacggctcggcagcgcctgcagaccatgcacgatgtcatgttcaatggaggcatccagacctttcaggcgagacagcttcgccaccagcatcaacagcacagttaactgagtggtgaatgctttagtggatgccacgccgatttctgtacccgcgttggtcattagcgccagatcggattcgcgcaccagagaagaacccggaacgttacagattgccagactaccaaggtaacccagctctttgctcagacgcaggccagccagggtatccgcggtttcgccagactgactcaaggtgatcatcaggctgttacgacgcacggcagatttgcgatagcggaattcagaggcgatttcgacgtcgcacggaatacctgctaggctttcaaaccagtagcgggaaaccataccggagttataagaagtaccacaggcgaggatctgaatatgctcaaccttgctcagcagttcgtcggcgttcggtcccagctcgcttaaatcaacctgaccgtggctgatgcgtccggtaagggtgtttttgatcgcgttcggctgttcgtagatctctttctgcatgtagtgacggtaaatgcctttatcgcccgcgtcatattgcagattggattcgatatcctgacgttttacttccgcgccagttttatcgaagatgtttacgctacggcgagtgatttccgcaatatcgccctcttcaaggaagataaagcgacgggtcaccggcaacagcgccagctggtcagaagcgataaagttttcgcccatccccaggccaatcaccagcggactaccagaacgtgccgccagcagggtatccgggtgacgggagtccatgatcactgtaccgtacgcaccacgcagctgcgggatagcacgcagaacggcctcacgcagagtcccgccttgtttcagctcccagttcaccagatgggcaatcacttcggtgtcggtttcagaaacgaaggtatagccacgcgcttttagctcttcacgcagcggttcatggttttcgatgatgccgttatgcaccaccacaatgtgttcagaaacatgcggatgcgcattcacttcactaggttcaccgtgggtcgcccagcgagtgtgagcaataccagtgccgccatgcagaggatgttcttccgctgcctgtgccagcatctggactttaccgaggcgacgcaggcgggtcatatgaccttctgcatcaacaacggccagaccggcagagtcatatccgcggtattccagacgacgtaaaccttcaagaaggatttctgctacatcacgttgcgcgatcgcgccaacaattccacacatagtttttgattccgatttatatcgttgtcggtcaacctgtatgcccgttttttcgggcgccccgagccttgtagagagtggggttatttttatagttactgcttgtgggagggagattatgttatctcctcatcccatgtgaccgggttagccggccagaatcactttttctttaccggacgacgccagccttctttctgagtctgcggcacacggctgatagctaatgcattttcgccgacattacgcgtcacagttgtacccgcagcaatggtcgcgcctttgcctactgttaccggggccaccagctgagtgtcggaaccaacaaacacatcgtcgccgataatggtcttaaatttattcgcaccatcgtagttgcaggtaatggttcccgcgccgatgttaacgttatcgccaatttccgcatcgcccaggtaagtcagatgaccagctttgctgcctttacccagacgcgcttttttcatctcaacgaagttaccgacgtgagcaccttccagcaactcagcaccaggacgcaaacgggcaaacgggccaatggtacaggccgctgccagattcgcatcttccacaacggtatacggactgatttcgcaatcatcgccaatcacgctgtttttaatcacgcaaccggtgccaattttcacgcgatgaccgagagtcacgttgccctcgatgataacgttagtatcaatttcaacatcgcgcccgtgagttagcgtaccacgcagatcaaaacgcgctggatcgcgcagcataacgcctgctaacagcagtttttcagcctgttcggactgataaacacgctccagacgggagagttgcaggcggttattcacgccttctacttcgcttaaacgttgcggatgaacggcgacgatttcacgcccttcctgatacgccagcgcaataatgtcggtgatgtagtattcgccctgagcattattgttggtcagcttcgccagccagcgtttcatatctgcgccgttggcaatcagaatgccggtgttgatctcctgaatctgacgctgctcgtcggtggcatctttgtgctcaacaatgccggtaactttgccgttttcacgggtgatacgtccataaccggtcggatcatccagtttcaccgtcagcagaccaatgccaccctgcggtttagcatcacgcagacgctggagtgtttcgacagagatcagcggcacgtcgccgtagagcattaaaatgtcttcatcatcggcaaagaaaggtgcggcctgctgcattgcatgacccgtacccagctgctctgcctgaagcacccagttaaggttgtcgtctttcagcgcctgttttagcagatcgccgccgtgaccgtacaccaggtgaacgtgcgctgcgcctaattcattcgcagcatcaatgacatgctgaaccatcgctttcccggcaagggtatgcagcactttcggaagatcggaatacatgcgcgtgcctttgcctgcggcaaggatcactacgctcatagcattattcaacatacgcgtcctgactgtaatttgagaacgaatttaaaccgcttcaccttgaaaaaactacatttttttcatcgtgaaatggacagaggataaattgttcaataacggattatccccgctgacgaaagcgccattttcgaccatcgtcacgccttttgtctgcagaaaattaaggcagtaccttaatttaagcgtcaggtggatgtttttgctcttatttcgatcaatgaataaacaggaaaacaggggggttttatatcagcaggatctatgtgaacgctattcaggacgggtcacacgcgcaaaaaaaagccagcctgtttccagactggcttttgtgcttttcaagccggtgttacatcgcttttttggtcaactcgataacgcgcagctgcgcgatcgctttggccagttccgcagacgcctgagcgtaatctacgtcgccgtgagagctgctaatgtgctcttcagccttacgtttcgcttccatggctcgcgcttcgtcgagatcctggccgcgaattgcggtgtcggccagaacggtcacgttgccaggctgcacttcaagaatgccgccagacagatagataaactcttcgtgaccgtgctgtttcacgatgcgaatcataccaggcttaatggcggtgagcagcggtgcgtggccagggtagatccccagttcaccttcgctacccgttacctggattttctcgaccagaccagagaacatttgttgctctgcgctgacgacgtccaggtggtaagtcattgccatatcaccctccgattaaggcgttaaagttttttggctttttccacagcttcttcgatggaaccgaccatgtagaacgcctgctccggcaggtgatcgtattcgccttccatgatgcctttaaagccacggatggtgtctttcagggagacgtatttacccggagaaccggtgaatacttctgccacgaagaacggctgggacaggaagcgctggatcttacgagcacgcgctaccaccagtttgtcttcttcagacagttcatccatacccaggatggcgatgatgtctttcagttcctgataacgttgcaggatggactgaacgccacgcgcggtgtcgtagtgttcctgaccaaccaccagcgggtccagctgacggctggtggagtccagcgggtcaacggccgggtagatacccagagacgcgatctgacggctcagtaccacggttgcgtcaaggtgcgcaaaggtggttgccggagacgggtcagtcaagtcatccgcaggtacgtatactgcctgtacggaggtgatagaaccagttttggtggaggtgatacgttcctgcagaacgcccatctcttccgccagggtcggctgataacctaccgcactaggcatacggcccagcagtgcggatacttccgtaccggccagggtgtaacgatagatgttgtcaacgaacagcagaacgtcacgaccttcgtcacggaatttctcagccatggtcagaccggtcagagcaacgcgcagacggtttcccggcggctcgttcatctggccatacaccagggatactttgtcgataacgttggagtcggtcatttcgtggtagaagtcgttaccctcacgagtacgttcacctacgcccgcaaacacagagtaaccggagtgctcgatcgcgatgttacgaatgagctccatcatgtttacggttttacctacacccgcaccaccgaacagaccaactttaccgcccttagcgaacggacacatcaggtcgataactttgataccggtttccagcagttcctgagagttactcagctcttcgtaggaaggtgctgcgcggtgaatcgcccaacgctcttcttcaccgatctcgcctttcatgtcgaccggttcacccagtacgttcatgatacggcccagagtcgctttacctaccgggacttcaatcgggtgttcgaggtcttttacatccagaccgcgacgcagaccgtcggaggaacccattgcgatggtacgtacgataccgccgccgagctgctgctgaacttccagcaccagacgctcattaccattttgcacctcaagagcatcgtacacgcgcggtacggcatcctgagggaattcgacgtcaactacggcgccgattacctggacaatctttccagtagccatcttaaatcctctacgaaataacctgtttaaaccgcggcggccccgctgacgatctcggtgagttcctgagtaatgctggcctgacgagctttgttgtataccaactgcagctctttaatcaggctgccgccattgtcggtcgcggctttcatcgccaccatacgggcggcctgctcgctggccaggttttcaaccacgccctgataaacctgagattcgacataacgacgcagcagggtatccagcaacgccttcggatcgggttcgtacaggtaatcccaggatttatgtttcagatcatcatcatcacttgccggtaacggcagcagctggctgatggtcggaacctgagacatggtgttaataaatttgttgctgacaatgtaaagcttgtccagacggccttcgtcgtaggcctgcaacatcacttttaccggaccgatcagttcggacagggaagggttatcccccatgccggtgacctgggcaacaacattgccgcccacggagttgaagaagctcacgcctttgctgccgatcattgcgaggtcgcattgaacgcctttgtcggtccaggtcttcatttccgccagcagttttttgaacaggttaatgttcaaaccaccgcacaaaccacggtcggtgctcaccaccaggtagcccacgcgtttaacgtcgcggtcttccaggtaagggtgcttatattccagattaccgtgtgcaaggtgaccaatcactttgcgcatggtttctgcataaggacggctggccgccatgcgatcctggcttttacgcattttggaagcggcgaccatctccatcgctttagtgatcttttgcgtgttctggacgcttgcgatcttactacgtatctcttttgcgccggccatgagcttctcctcaatgccttgcggcctgccctaaggcaagccgccagacgttaccaggattgggttgctttgaaggaatcgaggatgcctttcagcttgccttcgatttcgtcgttgtagccaccggtctggttgatctcttgcatcaacggagcgtgatcacggtcgacgtaagccagcagagcggcttcgaagctgccaattttgctcagttcaacatccgccaggtaaccacgttctgctgcgaacagaaccagagactgctgcgcaacggacatcggcgcatactgtttctgtttcagcagttcggtcactttctgaccgtggtcaagctgcttacgtgttgcatcgtcaaggtcggatgcaaactgagagaacgctgccagttcacgatactgtgccagagcggtacggataccaccggacagttttttcatgatcttggtctgtgctgcaccaccaacacgggatacggaaatacccgggttaaccgcaggacgaataccggcgttgaacaggttggtttccaggaagatctgaccatcggtaatggagattacgttggtcggaacgaacgcagaaacgtcacccgcctgagtttcgataatcggcagtgcggtcagagaaccggttttccctttcacttcacctttggtgaaggcttcaacgtattcggcgttaacacgtgcagcacgctccagcagacgagagtggaggtagaaaacgtcgcccgggaatgcttcacgtcctggcggacgacggagcagcagggagatctgacggtaagcaacagcctgtttagacaggtcatcgtaaatgatcagcgcatcttcaccgcggtcacggaagtattcgcccattgcgcaaccggcatacggtgccaggtattgcagtgcagcggattcagacgcggttgctaccacaacgatggtgttagccagtgcgccgtgctcttccagtttacgtaccacgttagaaatggtggacgctttctggccgatagcgacatagatacatttgataccggaatcgcgctggttgatgatggcatcgatagccagtgcggttttacctgtctgacggtcaccgatgatcaattcacgctgaccacgaccgattgggatcatggagtcaacggctttataaccggtctgtaccggctgatctacggactgacgttcgataacgcccggagcgattgcttctacagcagagaagccgtcgtgatccagcggacctttaccgtcgattggtgcacccagagtgttaaccacacggcccagcaggccacggccaaccggaacttccaggatacggccagtacacttaactttcatgccttcggcaaggtcagcgtacggacccataacaaccgcacctacagagtcgcgctcgaggttcagtgcgatagcgtaacggttacccggcagggagatcatttcaccctgcatacaatcggccaggccgtgaatgcggataacaccgtcacttacagaaacaatagtaccttcgttgtgagcttcactcacaacattgaactgagcaatgcgctgcttgatcagttcgctgatttcggtggaattcagttgcatgctccagtccccttaagactgcaagacgtctgcaaggcgctcaagacgaccgcgtacgctgccatcaatgaccatatcacccgctcggatgataacgcctgccattacagacttatcgattttgcaattcagcttaactttgcgactcagacgtttttccatcgcagcagaaattttcgcgagctgttgttcactcagtgcggcagcggaaatgacgtctacctcagcggtagcctcactcacggcacgcaggtgaataaactgctccagaacatccgggagcgcgttaagacgaccattttcagccataacccgaatcaggttctgaccgttttcgtccagttgctcaccacaaactgcgataaagctctcggcgagcgtttctggcgcaagcgcgccagagagaagctctgccatttgttcgtttttggttacctcggcggcaaacgccagcatgtcctgccagcgttctacactttggtgttcgacggcaaagtcaaaagctgctttggcgtaggggcgagctaccgtaataaattcagacatcagcccctccctccttacagttcagcgacaagtttatccacgatgtcgctgttagcagcttcatccacggaacgttcgatgatcttctcggcgccagcaacagccaggatagcaacttgcttacgcagctcttcacgggcacgtttacgctcggcttcaatttccgcctgcgcctgggccacgattttagtacgttcctgttctgcctcagctttcgcttcgtccagaatctggctgcggcgtttgttcgcctgctcgatgattacctgggcttccgctttcgcttttttcagctggtcggtcgcgctggcctttgcaaggtcaaggtccttatgtgctcgttctgcggaagcaaggccgtcagcaatttctttttgacgtttttcgatggctgccattaatggcggccatacgtacttcatgcagaacagaacgaacaggacaaacgcgatggcctggccgaggattgttgcgttaagattcacagcacaatgcctctatttagttaacgttctgatattgctctttaaataaaagcaacgcttattacgcgacagcgaacatcacgtacagacccagacctacagcgatcatcgggatagcatccaccagacccataacgataaagaactgagtacgcagcagaggaatcagatcaggttgacgcgctgcgccttccaggaatttacccccgaggatgccgataccgatcgcagcaccgattgccgccagacccatcatcacagcggcagccatgtacagcagatccatattcaggttttccatgacagtctccagtttgtttcagttaaaacgtagtagtgttggtaaattaatgttcttcagacgccatgctcagatagacgatcgtcagaaccatgaagatgaaggcttgcagcgtaatgatcaggatgtggaaaatggcccacggcacattcaggatccactgactccaccacggcaacagaccagcaatcagaatgaaaatcagctcaccggcatacatgttaccgaacagtcgcaaaccgagactaactggtttggacagcaggcttaccccttcaaggattaagttgacaggaatgaacgcccagtgattgaacggctgcagcgtcaactctttcgtgaagccgccgatgcctttcattttgatgctgtagaacagaatcaggataaatacgcccagtgccatagacagcgttacgttcacgtccgcagacggaaccacacgcagtgcaggcagacccagtacatgttcagcaatgtacggcagcaggtcgataggcagtaaatccatcaggttcatcaggaatacccagacgaagatcgtcagggccagcggagcaatcagcttgcttttgccatggtacatgtctttcacgctaccattaacaaagccgatcaccagctcaatcgcggtctgaaacttacctggcacaccgctggtcgcctttttggctacgctacggaataaaaccaggaacaacagacccagcaccacgctgaagaacatggagtcaatattgattgtccagaaggtggctggggggttttgtggatccaccaggctgaatgtacgcaggtccagctgaaggttattcaggtggtgtcctatgtaatcctgcggcgtcatattttcactagccatgatgccttttaccctttgttgttaattacagccggtgccagtatctgaaccaccagcaccaaaacccacgtaacgatcagcggcaagaataccgcctttaaaaccgccaacgccaccaccagtaacaccaacatcgccagaactttgaaagcttcgccaaatgcgaatgtccaggccacccggcctttcgctggtgtatgcgcctggtgacgccaggcaaatatcataaacaaaacgttaggcagaaagactgccaggcccccgcttattgcagagacgccccagaaggggtctttgaggctgaacagcaatccacttgctatcaccaccagtaactgaacgagcagaagcttccgagcaacgtttcgactcacgaggctcacagacatcacgtttttcactcctgctcccttcgaggtatgccgcgtgtcgtataaaactttctttaaggcttagagtcaagcatcaaaaagcggtcaaattatacggtgcgcccccgtgatttcaaacaataagtagccaaaaggtgaataaatgtttaaatatttttccagtgcatacaattgcgacttttctgctaaccctgttcgatcatgaaaaactgtaaataacgcgtaaacactggtgataaagcgtgcttcagatcacatattgcgcatgttcgcgcacagcatatttatttacttggcaaatgatgcctttgcaagtttatgatatttcagtctaaaaacagatactgttttaataaatgacatttacacaacaaaaaccacccattgacatttttaataatgttttaacagccaatgatggttcttagcgccgatttttagcagactgatattttcactaatgacttattttctgcttaccaaaaaaagccacgttatcttgttgatgcaaaagagtgaacgtggcgttaaatgtaaccagttatatcagtagaaaacctggttgttgttaacagtctaaccggtcaattttttatgatttttttgataaaaattaaattttatttgctttaatcaccaccagatgacgttcgccatccagggctggaacctgaagtttaaccacactttcgacctgatattcttcgggcaacaaagcgatttcatcttccggcatttgccctttcagcgcgtagaaacggccttgctcaccaggaagatggtggcaccagctcaccatatcgttcagagaggcaaaagcgcggctaattacgccatcaaatggcggctcactaggaaactcttctaccctgctctgtactggttcaatattctccagtttaagctcatgttgcacctgacgaaggaaacgcacgcgtttaccaaggctatccaacagagtgaaatgggcttcaggacgcacgatagagagtggaatgcctggcagtcctggtccggtgccgacatcgataaaccgttcaccttgcagatacggtgccaccacaatgctatcgagaatatggcgtaccagcatctcattaggatcgcggacgctagtcaggttgtacgctttgttccatttatgcagcatattcacgtaggcaataagctggtttttctggtgatcggtaaggctaatacctgcgtctttcagcagtaaggagagtttgttgagcacggtgattacctgttcttgatgcgttgcctggtaagcgggtgcttaccaggcatttttaatgcgttatgcgctacgacgcagcataccctgttttttcagccacaccagcagaatggagatggccgcaggcgtgacgccagaaatacggctagcttggccgatagaggctggtttgtgatcgttaagtttggcgatcacttcgttagaaagaccggatacctggcggtaatccagtgtcgcgggtagcagggtgttctcgttacgcagctgcttttcgatctcatcttgctggcgcgcgatataaccttcgtatttaacctgaatctcaacctgttccgccgcctgttcgtctgtcaacgcaggggcaaacggcgtcagcgtggttaatttttcataagtcatttccggacgacgcagcagatcttcaccactggcttcacgggaaagcggcgcagtcaggtgagcattcacttcggctgcagcttccgcgctcggggttacccaggtgcttttcagacgctgacgctcacgctcgatattctcaagtttctcgttaaagcgcgcccaacgttcgtcatccaccaggcccagttcacgaccgatttcagtcaaacgcagatccgcattatcttcgcgtagcatcagacgatattctgcgcggctagtaaacatacgatacggttctttggttcctaaagtgcacaggtcatcaactagtacgccgagatacgcctgagaacgtgccggagcccaaccttctttgtcagcagacagacgggcagcgttaagaccggccagcaaaccttgcgcagcggcttcttcgtaaccggtagtgccgttaatctgaccagcaaagaacagcccctggataaacttgctctccagcgtcggtttcaggtcgcgaggatcgaagaagtcatactcaatggcataacccggacgcacgatcttcgcgttttccatcccctgcatagagcggacgatttgcatctgcacatcgaacggcaggctggtggagataccgttcggataaatttcattagaggtcagtccttccggttcaaggaagatctgatgctgatttctgtcggcgaagcgcatgactttgtcttcgatgctcgggcagtagcgtgggccgacaccttcgatcacccctgcgtacattgggctacgatcgaggttactgcggatcacatcatgggttttctcgttggtatgagtgatataacacggcacctgctggggatgctgggacgcattgcccataaagctgaataccggcattgggttatcgccatgctgttgcgccagtacgctaaagtcgatggttcgagcatcaatacgcggtggtgtcccggttttcagacgaccaacgcgcagcggcagttcacgcaaacggcgagaaagcggaatggacggcggatcaccagcacggccaccgctgtaattatccagaccgatatgaattttaccgtcgaggaacgtcccaacggtgagcacgacggctttggcacggaacttcagtcccatttgggtaacagcaccgaccacgcgatcgttttcgacaataagatcttcaaccgcctgctggaagatcatcaggttcggttggttctccagcgccgtacgtaccgcctgacggtagagcacacgatccgcctgagctcgggtagcgcgaaccgccggtcctttgcttgcgtttagtatcctaaactggatacccgcctgatcgatcgctttcgccatcagaccgccgagtgcatccacttcttttaccagatgtcccttcccaataccgccgatcgccgggttgcagctcatctgccccagagtgtcgatattgtgtgtcaaaagcagagtctgttgacccatacgcgccgcggccatcgcggcctcggtgcctgcatgacccccgccaatgatgatgacgtcaaaaggatccggataaaacatggtgattgcctcgcataacgcggtatgaaaatggattgaagcccgggccgtggattctactcaactttgtcggcttgagaaagacctgggatcctgggtattaaaaagaagatctatttatttagagatctgttctattgtgatctcttattaggatcgcactgccctgtggataacaaggatccggcttttaagatcaacaacctggaaaggatcattaactgtgaatgatcggtgatcctggaccgtataagctgggatcagaatgaggggttatacacaactcaaaaactgaacaacagttgttctttggataactaccggttgatccaagcttcctgacagagttatccacagtagatcgcacgatctgtatacttatttgagtaaattaacccagcttcccagccattcttctgccggatcttccggaatgtcgtgatcaagaatgttgatcttcagtgtttcgcctgtctgttttgcaccggaatttttgagttctgcctcgagtttatcgatagccccacaaaaggtgtcatattcacgactgccaataccgattgcgccaaagcggactgcagaaagatcgggcttctgttcctgcaatgcttcatagaaaggagaaaggttgtccggaatatctccggcaccgtgggtggagctgataaccagccagatcccactggcaggtaaatcttctaacagcggaccgtgcagcgtttcggtggtaaaacccgcctcttccagcttttcagccaggtgttctgctacatattcggcaccgccgagggtgctgccgctgataagagtgatatctgccataaaccgccacctttattaagagtggcgtattgtacgctgtgaacgcgttgggatctacctgtggaaaagtatgggattaaaaaagccgatcagggcttgatggtacgcatgatcgggttttgcaggacgatcaatgtctcggtggactgaatttcatcaattgtttggatcttgttgataagtacatgctggagagcgtcgatgctacggcacatcacttttataaagatgctgtagtggccggttgtgtaataggcttcagtgacttcatcaaggctttccagctttgccagcgcggaagggtagtctttggcgctctttaatataatgccgataaagcagcctacgtcataaccgagctgcttcgggctgacatcaatacgcgccccggtaatgatccccgcctgcttcattttctctactcgaacgtgaatcgtccccggactgacgccaaattgtttcgccagttcggcgtaagcggtgcgcgcattgcccattaatgcttccaggatgccacggtccagattgtcgatcagataattttccataggattttcttatgcggattgatgattcattctattttagccttcttttttaatgaatcaaaagtgagttaggctttttattgaatgattattgcatgtgtgtcggtttttgttgcttaatcataagcaacaggacgcaggagtataaaaaatgaaaaccgcttacattgccaaacaacgtcaaattagcttcgtgaaatctcacttttctcgtcaactggaagaacgtctggggctgatcgaagtccaggcgccgattcttagccgtgtgggggatggcacgcaggataacttgagcggctgtgaaaaagcggtgcaggtaaaagtgaaagctctgcctgatgcccagttcgaagtggttcatagtctggcgaagtggaaacgtcagaccttagggcaacacgacttcagcgcgggcgaagggctgtacacgcacatgaaagcccttcgccccgatgaagaccgtctttctccgttgcacagcgtctatgttgaccagtgggactgggaacgcgtaatgggcgacggtgagcgtcaattcagcactctgaaaagcacggtagaggcgatctgggcgggaattaaagcaaccgaagctgcggttagcgaagagtttggcctggcaccgttcctgccggatcagatccacttcgtacacagccaggagttactgtctcgttatccggatcttgatgccaaagggcgtgagcgggcgatagcgaaagatcttggcgcggtattccttgtcgggattggcggcaagctgagcgatggtcatcgccacgacgtgcgcgcaccggattatgatgactggagcaccccgagtgagctgggccatgcgggtctgaacggcgatattctggtgtggaacccggtactggaagatgcgtttgagctttcctccatggggatccgtgtagatgccgacacgctgaagcatcaactggcgctgaccggtgacgaagatcgcctggagctggagtggcatcaggcgctgctgcgcggtgaaatgccgcagaccatcggcggcggtatcggccagtctcgtttgactatgctgctgctgcaactgccgcatatcggccaggttcagtgtggagtatggccagctgctgttcgcgagagcgtcccttctctgctgtaataatttatcgccgccagcgtctgagcaggcggcttcgcatcccggtatcaaagcgccagatatgatcgaaaatgcgcatgatgccgggtttgccgtgtgcgctcatcgccacggcatgaaagcgatgctgatgtacccgctgcagctctttcactttactcgtcacgtcgtcaggcaaccgctgagcgataaaatcagaaatcaccaccgcatcggcatcaaaccattccctgctttgcaagcgttccataatggcgcgaaaacaactggcaagatcggtgccgccacgaaactgctggcttaaaaaacggattgcttgttcgatgccttgtgggccactaagctcataacggacgatctcggtggaaaatagcataatatagcagcgccggttttctgcgagagcaatgcgcatcaaggccaggcagaacgctttcgcacactgttcattaaagccgcccatactgccggaagtatccacacagacaataaacggcccgcgcggctgttcatcgtaatctttatgtaccaccggacgttcgatcactttttcacgccagctctcaccgtgcaggcgataggtgagcaactgtttttccaccagccgacggtaaaactcatactccagttccgttatccctagtgtcgccagttctggcggcaggagacgtaaaatatcatcgctttgttgcagaccatcaacctgctcaggaaccgtcgccggttcgcgcaccatggtgcggaaggtttccatctgcgcatcgttgcgcggtatacttttggcttcccgagaacgccccagctgctctgccaggcgtttcagttccggctgttcgttaagaaattcaccgtatttcacaatcaactgatagtcgccacgtttaagctgaccggcgctcatatcccacagacgaccagctgcagtattgttatctgcgagaatcggttcaagttgtccgctcagcgtcatgcgttcctgaacttcactcaacagttgttcgcgttcttcttctaatagctgttgatttaacgtcgttgcttgcacgatcagacttaaacgccaacgctggagaaaaagcgtgtgtaacgcactagtgatcgtgctgttagcatcaaccaactgtcgggcttgttctgcccatggagaattcagacgatgcagtaagtccaggatctgtggtagctgcacaataaactgtggcgtggagaggagctggctttgctgatagcacatcacctcttcggtgagttccggcgggactcgggcatctttcagccgactgcgcagcgcttcacgccagcggggaacatcatcagtgattgccgccttcaggcgtgggaatttttcaaagaagaccgccagctgcggactggccagcagtgcgatgatcatctcttcgatcaatccctcttcgctgacggccagcatcacattaagcgtatccagcgttagcattgttgtgcctggcgaatctgtgcaccgacatcctgtaggctggcttcaatgcgacctaaccagtcgccagggataaacagacatttttgctgttcgctgaataaagcgtgttgcttgcgccagtcgctttcaagctcttccagttgttgttttatttcaccaggcagaccttcagcgctactaccgggaagtgccagcgtactgccttgtaaacttacatcgcgaacgacaagatgttgggcgctatcaacttccagattcagtttctgggcaaagccgataccgttcagtttaccgcgaatttcaccacctttgctcagccactgttccagcgcgctacgctcaaaggagatatgaaccacttccatatcatgcagttttaacggtttttgcagcagtagagtcagagtggaagcagtaacgttaacaggaagttgatactgctgacgacggctgaaaatgccgcccagacgaattaccgttaaggctgttttatcgctttgttgctgctggagttgcaggtgacgttgcacaatcgcgccaaggcgagtcaacatcccttgctgttgccaggcgtgaccggtcatcaatacatcaatttgttgttgtatcaaattcaggctttgcgcgtcataccacaggcaatctttcagcaaaatgagatctaccggggcaacagcactgcgaccgctaaaaaaggcgctggcctgcaataatcggatcgcttttttccagcgacgatcgctgacataaggcgcatccggtaatttatccagttgctggcgcagcataaaaatcagctcaaatacatgatcgggcagcgtaatttcaccaatctctttctgccagcgttcatattcttcatctgtgacctgcaaggcatcaggaaccggattgtcgttttcatcctgttgactggtcagcatggagcggaaattcgctttatcctgcactttatctaaccacagacgaatcagcatgcggtcatataacgcttccagactgctgtctgcttccggcagctcgttggaggccgccaccagcagacgcatcgggattttttctacgtgtgcaccgttgcggaactggcgctcgttaatggcggtgagcaaggtattaagaattgccgggcccgctttccagatctcatccagaaagacaatttctgcttccggcaggtaaccgctggttaaacgttcatagcgcccttcatcttttagcgcctgaatagaaaggggaccaaaaacttcttccggcgtggagaagcgggtcatcagatattcaaacgcgcgggcattctgaaaggcgaattttaagcgccgggcgatcaaacttttggcaatacctggcgggccaaggaggaacacactttcaccacttaatgccgctaataaacacaagcggatggcgtggctacgttcataaagccccttttccaagctactgctcaggcgggaaattctttccgctaataaatgagggtgagccataatgaagtggcgtcctttcgtcaaaagttctgcgtaaattgcgagtatagacgtttcttgctggtggctaaaatagtctcaaagggggggtatttttctttgagccaggttaatgtggccgcatttaggagtacgattttgccgttaatcgtgcatactgtgcgcttttttgtgggccaagggactaagcacacatttcatatttcaacgaaagactagtctatgagcactgataataagcaaagtttgcccgcgattaccctcgcggcgattggagttgtctacggcgatattggtaccagcccgttatatacacttcgtgaatgtttgtccggccagtttggttttggcgttgaacgcgatgccgtgtttggctttttaagcctgatcttctggctgctaatctttgtggtttccattaaatatctcaccttcgtgatgcgggcagataacgccggtgagggggggatcctgacgttgatgagccttgccgggcgtaatacgagcgcgcgaaccacaagtatgctggtgattatggggctaatcggcggcagctttttctatggtgaagtcgtcataacacccgctattagcgtgatgagtgccattgaaggtctggaaatcgtcgccccgcagctggatacctggatagttcccctcagtattatcgttctcactttattatttatgattcaaaaacatggcacggctatggtcggtaagctgtttgcgccgatcatgctgacctggtttttgattctggcaggactggggttacgtagcattattgctaacccggaagtgctgcatgcgctgaatccaatgtgggcggtgcatttcttccttgaatacaaaacggtttcttttattgcattaggggcagtggtgttgagcattacgggggtcgaggcgctgtatgctgatatggggcactttggtaagttccctattcgcctggcgtggttcaccgtcgtattaccttccttgacccttaattacttcggtcagggagcgctgttgttaaagaacccggaagcgattaagaacccgttcttcctgttggcaccggactgggcgctgatcccgctgctgatcatcgccgcactggcgacggtaattgccagccaggcggttatctctggcgtcttcagtttgacgcgtcaggcggtacgtctgggatatttgagcccgatgcgcattattcacacctccgaaatggagagtgggcaaatctatattccgtttgtgaactggatgctctatgtcgcggtcgtgattgtgattgtcagctttgagcactccagcaacctggcggcggcgtacgggattgcggtgaccggaaccatggtgctgacgtctattctcagcactaccgtggcacgtcagaactggcactggaataagtattttgttgcgctgatcctgattgctttcctttgtgtcgatattccattgttcaccgctaacctcgataaactgctctccggcggctggttgccattgagcctcggtactgtgatgtttatcgtgatgaccacctggaagagcgagcgtttccgcttgctgcggcggatgcatgaacatggtaactctctggaagcgatgattgctagcctggagaaaagtccgcctgttcgcgtgcccgggaccgcggtgtatatgagccgtgcaatcaacgtcattccctttgcgctgatgcataaccttaaacataacaaggtattgcatgagcgggtgattctgttaactctgcgcaccgaagacgctccatatgtccataacgtccgtcgggtacagattgaacaactgagccccactttctggcgcgtggtggcaagttatggttggcgagaaacgccaaacgtagaagaagttttccaccgctgcggtctggaaggattaagttgccggatgatggaaacctccttctttatgagccatgagagcttgatcctcggcaaacgcccgtggtatttgcgtctgcgcggcaagctgtacttgctgctgcaacgtaatgcgctgcgtgcaccagatcaatttgaaatcccgccaaacagggttatcgaactgggtactcaggtcgaaatctaacgccagacgcctcctttcttcataagggggcgtttttgttttcatggttaatcaccatgtaaaacgtttcgaggttgatcacatttccgtaacgtcacgatggttttcccaactcagtcaggattaaactgtgggtcagcgaaacgtttcgctgatggagaaaaaaatgaaaaaaggcaccgttcttaattctgatattagtagcgtgatctcccgtctgggacataccgatacgctggtggtgtgtgatgctggtttacccatccccaaaagtacaacgcgtatcgatatggcattaacccagggtgtaccttcttttatgcaggtgctgggcgtcgtcacaaatgaaatgcaggtcgaggcggccattatcgcggaagagatcaaacaccataatccgcaactccacgaaacgttgctcactcaccttgagcagctgcaaaaacaccagggaaataccattgaaattcgttacaccacgcatgaacaattcaaacaacaaaccgcagaaagtcaggcggtaattcgcagcggagaatgttctccgtatgcgaatatcattctctgtgctggcgtgacgttctgaggccgtcatggaagcattacttcagcttaaaggcatcgataaagccttcccgggcgtaaaagccctcagcggcgcagcgttaaatgtctatccgggccgcgtgatggcgctggtgggcgaaaacggcgcgggtaaatccaccatgatgaaagtgcttactggcatctatactcgcgatgccggtacgcttttatggctggggaaagaaacgacatttaccgggccaaaatcttcccaggaagccgggattgggattatccatcaggaactgaacctgatcccgcagttgaccattgccgaaaacattttcctcggtcgtgagtttgttaatcgctttggcaaaattgactggaaaaccatgtatgccgaagcggataaattgctggctaaacttaacctgcgctttaaaagcgacaagctggtgggcgatctttccatcggtgaccagcaaatggttgaaatcgccaaagtgctgagctttgagagcaaagtcatcattatggatgaaccgaccgatgcgctgaccgataccgaaaccgaatccctgttccgcgtcatccgcgagctgaaaagccaaggccgcggtattgtctatatctcccaccgcatgaaagaaatcttcgagatttgcgatgacgttaccgtttttcgtgatgggcaatttattgctgagcgcgaagtggcaagtctgaccgaagatagcctgattgagatgatggtgggtcgcaagctggaagatcaatatccgcacctggacaaagcgccgggagatatccgcctgaaagtcgataatctctgcggacctggcgttaacgatgtctcttttactttacgcaaaggcgaaattcttggcgtctctggtttgatgggcgcaggtcgtaccgaactgatgaaagtgctctacggcgcactaccgcgcaccagcggttacgtcaccctggatgggcatgaagtcgttacccgtagtccgcaggatggcctggcaaacggcattgtgtatatctccgaagaccgtaaacgtgacggtttagtgttgggcatgagtgtaaaagagaacatgagcctgacagcgctgcgctacttcagccgcgctggcggcagtttgaagcatgccgatgaacagcaggctgtgagtgatttcattcgtctgtttaatgtgaaaactccgagcatggaacaggcaattggtctgctttccggtggcaatcagcaaaaagtggcgattgcccgcggtctgatgacacgccccaaagtgttgatccttgatgaacctacccgtggcgtagatgtcggcgcgaaaaaagagatctatcaactgattaaccagttcaaagccgatggcttgagcatcattctggtgagtagcgagatgccagaagtattaggcatgagcgatcgcatcatcgtcatgcatgaagggcatctcagcggggaatttactcgtgagcaggccacccaggaagtgttaatggctgccgctgtgggcaagcttaatcgcgtgaatcaggagtaaaaaaatgacaacccagactgtctctggtcgccgttatttcacgaaagcgtggctgatggagcagaaaagccttatcgctctgctggtgctgatcgcgattgtcagcacgttaagcccgaactttttcaccatcaataacttattcaatattctccagcaaaccagtgtgaacgccattatggcggtcgggatgacgctggtgatcctgacgagcggcatcgacttaagcgtaggttctctgttggcgctgaccggcgcagttgctgcatctatcgtcggcattgaagtcaatgcgctggtggctgtcgctgctgctctcgcgttaggtgccgcaattggtgcggtaaccggggtgattgtagcgaaaggtcgcgtccaggcgtttatcgctacgctggttatgatgcttttactgcgcggcgtgaccatggtttataccaacggtagcccagtgaataccggctttactgagaacgccgatctgtttggctggtttggtattggtcgtccgctgggcgtaccgacgccagtctggatcatggggattgtcttcctcgcggcctggtacatgctgcatcacacgcgtctggggcgttacatctacgcgctgggcggcaacgaagcggcaacgcgtctttctggtatcaacgtcaataaaatcaaaatcatcgtctattctctttgtggtctgctggcaagcctggccgggatcattgaagtggcgcgtctctcctccgcacaacccacggcggggactggctatgagctggatgctattgctgcggtggttctgggcggtacgagtctggcgggcggaaaaggtcgcattgttgggacgttgatcggcgcattaattcttggcttccttaataatggattgaatttgttaggtgtttcctcctattaccagatgatcgtcaaagcggtggtgattttgctggcggtgctggtagacaacaaaaagcagtaataacgactacaggacatcttgaatatgaacatgaaaaaactggctaccctggtttccgctgttgcgctaagcgccaccgtcagtgcgaatgcgatggcaaaagacaccatcgcgctggtggtctccacgcttaacaacccgttctttgtaagcctgaaagatggcgcgcagaaagaggcggataaacttggctataacctggtggtgctggactcccagaacaacccggcgaaagagctggcgaacgtgcaggacttaaccgttcgcggcacaaaaattctgctgattaacccgaccgactccgacgcagtgggtaatgctgtgaagatggctaaccaggcgaacatcccggttatcactcttgaccgccaggcaacgaaaggtgaagtggtgagccacattgcttctgataacgtactgggcggcaaaatcgctggtgattacatcgcgaagaaagcgggtgaaggtgccaaagttatcgagctgcaaggcattgctggtacatccgcagcccgtgaacgtggcgaaggcttccagcaggccgttgctgctcacaagtttaatgttcttgccagccagccagcagattttgatcgcattaaaggtttgaacgtaatgcagaacctgttgaccgctcatccggatgttcaggctgtattcgcgcagaatgatgaaatggcgctgggcgcgctgcgcgcactgcaaactgccggtaaaagcgatgtgatggtcgtcggatttgacggtacaccggatggcgaaaaagcggtgaatgatggcaaactagcagcgactatcgctcagctacccgatcagattggcgcgaaaggcgtcgaaaccgcagataaagtgctgaaaggcgagaaagttcaggctaagtatccggttgatctgaaactggttgttaagcagtaattttaatcaggttgtatgacctgatggtgacataaatacgtcatcgacagatgaacgtgtaatataaagaaaagcagggcacgcgccaccctaacacggtggcgcattttatggacatcccgaatatgcaaaacgcaggcagcctcgttgttcttggcagcattaatgctgaccacattcttaatcttcaatcttttcctactccaggcgaaaccgtaaccggtaaccactatcaggttgcatttggcggcaaaggcgcgaatcaggctgtggctgctgggcgtagcggtgcgaatatcgcgtttattgcctgtacgggtgatgacagcattggtgagagcgttcgccagcagctcgccactgataacattgatattactccggtcagcgtgatcaaaggcgaaagtacaggtgtggcgctgatttttgttaatggcgaaggtgagaatgtcatcggtattcatgccggcgctaatgctgccctttccccggcgctggtggaagcgcaacgtgagcgtattgccaacgcgagtgcattattaatgcagctggaaagtccactcgaaagtgtgatggcagcggcgaaaatcgcccatcaaaataagactatcgttgcgcttaacccggctccggctcgcgaacttcctgacgaactgctggcgctggtggacattattacgccaaacgaaacggaagcagaaaagctcaccggtattcgtgttgaaaatgatgaagatgcagcgaaggcggcgcaggtactgcatgaaaaaggtatccgtactgtactgattactttaggaagtcgtggtgtatgggctagcgtgaatggtgaaggtcagcgcgttcctggattccgggtgcaggctgtcgataccattgctgccggagatacctttaacggtgcgttaatcacggcattgctggaagaaaaaccattgccagaggcgattcgttttgcccatgctgccgctgcgattgccgtaacacgtaaaggcgcacaaccttccgtaccgtggcgtgaagagatcgacgcatttttagacaggcagaggtgacgcttggctacaatgaaagatgttgcccgcctggcgggcgtttctaccagtacagtttctcacgttatcaataaagatcgcttcgtcagtgaagcgattaccgccaaagttgaagcggcgattaaagaactcaattacgcgccaagtgctctggcgcgtagcctcaaactcaatcaaacacataccattggcatgttgatcactgccagtaccaatcctttctatagtgaactggtgcgtggcgttgaacgcagctgcttcgaacgcggttatagtctcgtcctttgcaataccgaaggcgatgaacagcggatgaatcgcaatctggaaacgctgatgcaaaaacgcgttgatggcttgctgttactgtgcaccgaaacgcatcaacctagccgtgaaatcatgcaacgttatccgacagtgcctactgtgatgatggactgggctccgttcgatggcgacagcgatcttattcaggataacagcttgctgggcggagacttagcaacgcaatatctgatcgataaaggtcatacccgtatcgcctgtattaccggcccgctggataaaactccggcgcgcctgcggttggaaggttatcgggcggcgatgaaacgtgcgggtctcaacattcctgatggctatgaagtcactggtgattttgaatttaacggcgggtttgacgctatgcgccaactgctaagtcatccgctgcgtcctcaggccgtctttaccggaaatgacgctatggctgttggcgtttaccaggcgttatatcaggcagagttacaggttccgcaggatatcgcggtgattggctatgacgatatcgaactggcaagctttatgacgccaccattaaccactatccaccaaccgaaagatgaactgggggagctggcgattgatgtactcatccatcggataacccagccgacccttcagcaacaacgattacaacttactccgattctgatggaacgcggtagcgcttaattactcgctttcacttggaacgcggttcggcttagatttacgctgtcttttgatcaaattattaccatcggttgttttcagaagcatgaacattgctgcactagcaacagtaataatgcccattgtgataaacgtatagtggaattgttcgacagtcgttgtgccttccattccttcataaacgcgaaggacggccgcacttacagcaacgcctaaactaatgctcagttgctgcgtgaccgccagaacactgttaccgctgctggcattgtcatcggtcagatcggcaagtgtgatggtattcatcgcggtaaactgcgtgctcatagccatccctaatataaacaacggcaagatcagcatccatatagccattgctggactttgcaaagagaactgagcgatcattagcccaataatcaccgtgatccccactaacgtatggcgatagcccagacgacgtaagacttgggtaaccatgctttttgcaataatggaacctaacgctgtcggtgccatcatacagccagcaataaacgcctgataaccaaatcctacctgtaacatcaatggcataaggaacggtacacagccggtccccagacgggttgcaatattgcctacgataccgatgctgaaagtgcgggttttaaataaatctaaactaattaatgggtttggcgtgcgtcgtgcatggagaatatagagaagcagtaacccgatgctggtgacaattaccgtcaaggcaatccagctggcgacaatcttttccccgaatagctctattccgctactgaagagaacaaggctgaggccaaacagcaaaaagccagtgatatcgaatctgcgtcgtgcggtggtgaaattgggcatatgtttgcgcgcgtaaagaaggcccgcaatacctatggggatattgattaaaaatatccagtgccaggttgcccaggtgaccagcacgccgccaagaacggggcctaaaattggccccaccagacccggcatggcgacaaaattcaatactggaagaagttcattacgaggataagcgcgcagtaaggccagccgagcaacaggcatcatcattgcgccgcctatcccctgaataacccggaagacaaccagctgtggtaggctattagaaagtgcgcaggccagagaacccaatgtgaacagactcacggcaagggtaaaaatgcgacgcgtaccgaagcgatcggctagccatccgcttaccggaataagcatcgccaccgtcagcgtataactgatgatggcactttgcatcgcgagaggagaacgattaaggctatgagcgattgcgggtaaggcggtattaagaatagtggcatcaagtgcctgcatgaagaaggccatcgccgcgatccacggcaaacccgccatactgcgcttctttttatcgctcattcaatgtcctgttatcgggttatcacttatcaggactgcgtagcagcgcctgacaagctttaaatgccgcgtcgccatcgctttggataatcgcatcgacaatcgcctgatgcagatccagctttatcactgtgtcgctggtaatactcgtgaagtaagtgtgataaacgctatggaataggctggcgaaactggtcaaaaacggattggcgctcatttcatagatatgctcatgccaggccatatcgacttcgatccagcgttcacggcgaaagttctcttttaatgccgccatttcggccattaacgtattgagatgcgctttctgttccgcggtgccaaccgttgctgccagtaggcaggcttgcggctccagacagatacgcataaccagaaagtgatcgatgacctgatgaaagttctcttctgtcatccaccaggtaagcaattcctgatcaagaaaattccagttgctttgtggcatgacccgagtaccaattcgcggtcgcggtaaaaccatcccttttgccgttaacgttttgaccgcttcgcgtaccgctgtacgactcactccaaattgctcgcccagctcaatctcaccgggcaaaatggtgccgggttcatattcaccttttaagatccgttgcgccagcttctcagccagaacatagctaaggtttttctgtgcagctaactgttgtgcgcttaaaggcattacttatcttcctttttctttttattcctccttagtatgccaccaggaagtgtgattacggttgcaaaaacggcaaattgcttgttttatggcacattaacggggcttttgctgaaaaaatgcgcggtcagaaaattattttaaatttcctcttgtcaggccggaataactccctataatgcgccaccactgacacggaacaacggcaaacacgccgccgggtcagcggggttctcctgagaactccggcagagaaagcaaaaataaatgcttgactctgtagcgggaaagcgtattatgcacaccccgcgccgctgagaaaaagcaaagcggcactgctctttaacaatttatcagacaatctgtgtgggcactcgaagatacggattcttaacgtcgcaagacgaaaaatgaataccaagtctcaagagtgaacacgtaattcattacgaagtttaattctttgagcatcaaacttttaaattgaagagtttgatcatggctcagattgaacgctggcggcaggcctaacacatgcaagtcgaacggtaacaggaaacagcttgctgtttcgctgacgagtggcggacgggtgagtaatgtctgggaaactgcctgatggagggggataactactggaaacggtagctaataccgcataacgtcgcaagaccaaagagggggaccttcgggcctcttgccatcagatgtgcccagatgggattagctagtaggtggggtaacggctcacctaggcgacgatccctagctggtctgagaggatgaccagccacactggaactgagacacggtccagactcctacgggaggcagcagtggggaatattgcacaatgggcgcaagcctgatgcagccatgccgcgtgtatgaagaaggccttcgggttgtaaagtactttcagcggggaggaagggagtaaagttaatacctttgctcattaacgttacccgcagaagaagcatcggctaactccgtgccagcagccgcggtaatacggagggtgcaagcgttaatcggaattactgggcgtaaagcgcacgcaggcggtttgttaagtcagatgtgaaatccccgggctcaacctgggaactgcatctgatactggcaagcttgagtctcgtagaggggggtagaattccaggtgtagcggtgaaatgcgtagagatctggaggaataccggtggcgaaggcggccccctggacgaagactgacgctcaggtgcgaaagcgtggggagcaaacaggattagataccctggtagtccacgccgtaaacgatgtcgacttggaggttgtgcccttgaggcgtggcttccggagctaacgcgttaagtcgaccgcctggggagtacggccgcaaggttaaaactcaaatgaattgacgggggcccgcacaagcggtggagcatgtggtttaattcgatgcaacgcgaagaaccttacctggtcttgacatccacggaagttttcagagatgagaatgtgccttcgggaaccgtgagacaggtgctgcatggctgtcgtcagctcgtgttgtgaaatgttgggttaagtcccgcaacgagcgcaacccttatcctttgttgccagcggtccggccgggaactcaaaggagactgccagtgataaactggaggaaggtggggatgacgtcaagtcatcatggcccttacgaccagggctacacacgtgctacaatggcgcatacaaagagaagcgacctcgcgagagcaagcggacctcataaagtgcgtcgtagtccggattggagtctgcaactcgactccatgaagtcggaatcgctagtaatcgtggatcagaatgccacggtgaatacgttcccgggccttgtacacaccgcccgtcacaccatgggagtgggttgcaaaagaagtaggtagcttaaccttcgggagggcgcttaccactttgtgattcatgactggggtgaagtcgtaacaaggtaaccgtaggggaacctgcggttggatcacctccttaccttaaagaagcgttctttgcagtgctcacacagattgtctgataggaagtgaaaagcaaggcgtcttgcgaagcagactgatacgtccccttcgtctagaggcccaggacaccgccctttcacggcggtaacaggggttcgaatcccctaggggacgccacttgctggtttgtgagtgaaagtcacctgccttaatatctcaaaactcatcttcgggtgatgtttgagatatttgctctttaaaaatctggatcaagctgaaaattgaaacactgaacaacgaaagttgttcgtgagtctctcaaattttcgcaacacgatgatgaatcgaaagaaacatcttcgggttgtgaggttaagcgactaagcgtacacggtggatgccctggcagtcagaggcgatgaaggacgtgctaatctgcgataagcgtcggtaaggtgatatgaaccgttataaccggcgatttccgaatggggaaacccagtgtgtttcgacacactatcattaactgaatccataggttaatgaggcgaaccgggggaactgaaacatctaagtaccccgaggaaaagaaatcaaccgagattcccccagtagcggcgagcgaacggggagcagcccagagcctgaatcagtatgtgtgttagtggaagcgtctggaaaggcgcgcgatacagggtgacagccccgtacacaaaaatgcacatattgtgagctcgatgagtagggcgggacacgtggtatcctgtctgaatatggggggaccatcctccaaggctaaatactcctgactgaccgatagtgaaccagtaccgtgagggaaaggcgaaaagaaccccggcgaggggagtgaaaaagaacctgaaaccgtgtacgtacaagcagtgggagcacgcttaggcgtgtgactgcgtaccttttgtataatgggtcagcgacttatattctgtagcaaggttaaccgaataggggagccgaagggaaaccgagtcttaactgggcgttaagttgcagggtatagacccgaaacccggtgatctagccatgggcaggttgaaggttgggtaacactaactggaggaccgaaccgactaatgttgaaaaattagcggatgacttgtggctgggggtgaaaggccaatcaaaccgggagatagctggttctccccgaaagctatttaggtagcgcctcgtgaattcatctccgggggtagagcactgtttcggcaagggggtcatcccgacttaccaacccgatgcaaactgcgaataccggagaatgttatcacgggagacacacggcgggtgctaacgtccgtcgtgaagagggaaacaacccagaccgccagctaaggtcccaaagtcatggttaagtgggaaacgatgtgggaaggcccagacagccaggatgttggcttagaagcagccatcatttaaagaaagcgtaatagctcactggtcgagtcggcctgcgcggaagatgtaacggggctaaaccatgcaccgaagctgcggcagcgacgcttatgcgttgttgggtaggggagcgttctgtaagcctgcgaaggtgtgctgtgaggcatgctggaggtatcagaagtgcgaatgctgacataagtaacgataaagcgggtgaaaagcccgctcgccggaagaccaagggttcctgtccaacgttaatcggggcagggtgagtcgacccctaaggcgaggccgaaaggcgtagtcgatgggaaacaggttaatattcctgtacttggtgttactgcgaaggggggacggagaaggctatgttggccgggcgacggttgtcccggtttaagcgtgtaggctggttttccaggcaaatccggaaaatcaaggctgaggcgtgatgacgaggcactacggtgctgaagcaacaaatgccctgcttccaggaaaagcctctaagcatcaggtaacatcaaatcgtaccccaaaccgacacaggtggtcaggtagagaataccaaggcgcttgagagaactcgggtgaaggaactaggcaaaatggtgccgtaacttcgggagaaggcacgctgatatgtaggtgaagcgacttgctcgtggagctgaaatcagtcgaagataccagctggctgcaactgtttattaaaaacacagcactgtgcaaacacgaaagtggacgtatacggtgtgacgcctgcccggtgccggaaggttaattgatggggtcagcgcaagcgaagctcttgatcgaagccccggtaaacggcggccgtaactataacggtcctaaggtagcgaaattccttgtcgggtaagttccgacctgcacgaatggcgtaatgatggccaggctgtctccacccgagactcagtgaaattgaactcgctgtgaagatgcagtgtacccgcggcaagacggaaagaccccgtgaacctttactatagcttgacactgaacattgagccttgatgtgtaggataggtgggaggctttgaagtgtggacgccagtctgcatggagccgaccttgaaataccaccctttaatgtttgatgttctaacgtggacccgtgatccgggttgcggacagtgtctggtgggtagtttgactggggcggtctcctcctaaagagtaacggaggagcacgaaggttggctaatcctggtcggacatcaggaggttagtgcaatggcataagccagcttgactgcgagcgtgacggcgcgagcaggtgcgaaagcaggtcatagtgatccggtggttctgaatggaagggccatcgctcaacggataaaaggtactccggggataacaggctgataccgcccaagagttcatatcgacggcggtgtttggcacctcgatgtcggctcatcacatcctggagctgaagtaggtcccaagggtatggctgttcgccatttaaagtggtacgcgagctgggtttagaacgtcgtgagacagttcggtccctatctgccgtgggcgctggagaactgaggggggctgctcctagtacgagaggaccggagtggacgcatcactggtgttcgggttgtcatgccaatggcactgcccggtagctaaatgcggaagagataagtgctgaaagcatctaagcacgaaacttgccccgagatgagttctccctgactccttgagagtcctgaaggaacgttgaagacgacgacgttgataggccgggtgtgtaagcgcagcgatgcgttgagctaaccggtactaatgaaccgtgaggcttaaccttacaacgccgaagatgttttggcggatgagagaagattttcagcctgatacagattaaatcagaacgcagaagcggtctgatgaaacagaatttgcctggcggccgtagcgcggtggtcccacctgaccccatgccgaactcagaagtgaaacgccgtagcgccgatggtagtgtggggtctccccatgcgagagtagggaactgccaggcatcaaattaagcagtaagccggtcataaaaccggtggttgtaaaagaattcggtggagcggtagttcagtcggttagaatacctgcctgtcacgcagggggtcgcgggttcgagtcccgtccgttccgccaccctaattaggggcgtagttcaattggtagagcaccggtctccaaaaccgggtgttgggagttcgagtctctccgcccctgccagaaatcatccttagcgaaagctaaggattttttttatctgaaataaccctctccgaagtaaatccttctaccggcatccttgccagccattcatattaatacacttcatccagcacgttaattttcaaaagatcgcgaatcaacgcatttttatcgctattttgcagccatatggcataaagcggccgactaagtgttgtgctatcgacaacggtatgcaggccgccttttttacgcgcccagctgacgggtagccaggtgcaaccattaagcatcgcaatctgttgctgtgccagttcagcagaactggttgtcagaatgggcacttcgtcagcaccgatcaaacctgcctcatgctgttgaaaatctggcccccactcaagtcgcagataattaagatctccctttagtttactaggggcactggtataaagcgctaaagtgaaatatcccagcaactgactactaaattcgtccattttgggcgcttcagtggtaataagaagatcaagctggcgttcatgcagctgttttaccagagactgccgttgggcaattcgcgcttcgaactgtaagcctgtatgggcatcctgattttgatacaagcgtcccagccactgattaagcatacattcccacaagctggcgctggcaccgatagaaaactcgttatgtcgactggtatgcgccacctccttacgggcggcctgccaggtgctcatgagcgtttctgcataaggcagtagtttttcaccggcagcggttaaacggatattgtttctgtggcgggtgaaaaggttcacacccagttgattttccagttgtctgattcgaaagctcactgcactctgggtcagatagaggctttcagccgctcgaccaaagtgacgcgttcggctaacttccaggaaagtttttaacaattccgtatccacagtgctctccgcaaaattatttgtcgttatgatttaaatgttttgttttacactctgtcaagcgtaactaatactccgcgccataactagctcggtcaaagaattaggagcgtgcaggatggcggaaagctttacgacgactaatcgatatttcgacaataaacattatccacgtggattctctcgtcatggtgatttcaccatcaaagaggcacaactgcttgagcgtcatggttatgccttcaatgagttggatcttggcaaacgcgagccggttaccgaggaagagaaactcttcgtagcagtatgccgtggcgaacgtgagccagtgacagaagcagaacgcgtgtggtccaagtatatgacgcgtattaagcgtccaaaacgttttcacaccctttccggcggtaaaccgcaggttgaaggtgctgaagactacaccgattctgacgattaataaaaagggcgaaatgccctttttttatgtcagtagtttctgcagatggatgagcaaacggtcaatcgctcgatagctaactgcctcctgcaaatgctgacgtgtgataatgtcagactgatcaatatcagcaatggttcgtgcaactttcaataaccgctgccaggcacgaatgcttaaccccagatggatcagtgttccttccaaccacatcgcatcttcgctctcaagtttgcagaattggcgtatttccggactatccagccaggcattcagtttattctgccgcttaaattggcgctctctggcggccattacgcgttgtttaacggtggcgctgctttctcccggcactaccgttttactcaaaatgccggggggtggtaatgggatctccagactgagatcgaagcggtcgagaaagggcccgctgagccggttgagataacgtaatgtctgttctggcgtgcagcggttatggtttccctgataatgtccggtagggctgggattcatcgccgcaacaagctggaaacgggctggataggttatttttgctcgtgtgcgactaagatggatctgcccggattcaatcggctctcgcaaggcatccagtgtacgccgttcaaattcaggtagctcatcaagaaaaagcacgccgttatgcgccaggctaatttcaccgggccctggaattgcgccaccgcctaccatcgcagttaagcttgcactgtgatgaggactgcggaacgggcgctgccgccattgtttttgtacactttcagcatttaccagacttaatatcgcagcactctccagtgcctcttcattgcttaaatctggcaacaggccattaatacggctggcgagcattgttttacctgttcccggcggcccaatcagtaaaaggttgtgcccgccagcagcggtaatttccagtcctcgctttccttgttcctgaccgataacatcactgagatcatgttgtagcgcccgggatactgcatcagttggtttcgggcgttcgagagcgtgcttaccttccagaaacgcacagacagcttgcagatgatcggctatcaggcatccttcaccgttaattagccccacttcatcttcgttatctttcgcgacgataatttttctgccgctcttaatagcttcagttgcactggagattgcgccgggaacgccacgcagagcgcctgtaagcgccagttctccgactaattcatattcatctaacttattggctgtaagctgttcactggccgccagcaacgcaatggcgataggtaaatcatatcgtcccccttcttttggcagatcagctggagccaggttgatggtgatttttttcgccggatattcatatccgctattgataatggcgctgcgcacgcgatcgcgagcttcttttaccgttgtttctggtaagcccaccatcgttaagccgggtagacctttactgatatgtacctcaacagtgatcgggggcgcatttactcccagggctgcgcgggtatgaacaatactcagactcataagccctccttgagtcaccattatgtgcataagatatcgctgctgtagcccgctaattcgtgaattttagtggctgattcctgtttatttgtgcaagtgaagttgagttgttctggcggtggaatgatgctcgcaaaaatgcagcggacaaaggatgaactacgaggaagggaacaacattcatactgaaattgaatttttttcactcactattttatttttaaaaaacaacaatttatattgaaattattaaacgcatcataaaaatcggccaaaaaatatcttgtactatttacaaaacctatggtaactctttaggcattccttcgaacaagatgcaagaaaagacaaaatgacagcccttctacgagtgattagcctggtcgtgattagcgtggtggtgattattatcccaccgtgcggggctgcacttggacgaggaaaggcttaaagatcaagccttaacgaactaagacccccgcaccgaaaggtccgggggttttttttgaccttaaaaacataaccgaggagcagacaatgaataacagcacaaaattctgtttctcaagattcaggacggggaactaactatgaatggcgcacagtgggtggtacatgcgttgcgggcacagggtgtgaacaccgttttcggttatccgggtggcgcaattatgccggtttacgatgcattgtatgacggcggcgtggagcacttgctatgccgacatgagcagggtgcggcaatggcggctatcggttatgctcgtgctaccggcaaaactggcgtatgtatcgccacgtctggtccgggcgcaaccaacctgataaccgggcttgcggacgcactgttagattccatccctgttgttgccatcaccggtcaagtgtccgcaccgtttatcggcactgacgcatttcaggaagtggatgtcctgggattgtcgttagcctgtaccaagcacagctttctggtgcagtcgctggaagagttgccgcgcatcatggctgaagcattcgacgttgcctgctcaggtcgtcctggtccggttctggtcgatatcccaaaagatatccagttagccagcggtgacctggaaccgtggttcaccaccgttgaaaacgaagtgactttcccacatgccgaagttgagcaagcgcgccagatgctggcaaaagcgcaaaaaccgatgctgtacgttggcggtggcgtgggtatggcgcaggcagttccggctttgcgtgaatttctcgctgccacaaaaatgcctgccacctgtacgctgaaagggctgggcgcagtagaagcagattatccgtactatctgggcatgctggggatgcacggcaccaaagcggcaaacttcgcggtgcaggagtgtgacctgctgatcgccgtgggcgcacgttttgatgaccgggtgaccggcaaactgaacaccttcgcgccacacgccagtgttatccatatggatatcgacccggcagaaatgaacaagctgcgtcaggcacatgtggcattacaaggtgatttaaatgctctgttaccagcattacagcagccgttaaatcaatgactggcagcaacactgcgcgcagctgcgtgatgaacattcctggcgttacgaccatcccggtgacgctatctacgcgccgttgttgttaaaacaactgtcggatcgtaaacctgcggattgcgtcgtgaccacagatgtggggcagcaccagatgtgggctgcgcagcacatcgcccacactcgcccggaaaatttcatcacctccagcggtttaggtaccatgggttttggtttaccggcggcggttggcgcacaagtcgcgcgaccgaacgataccgttgtctgtatctccggtgacggctctttcatgatgaatgtgcaagagctgggcaccgtaaaacgcaagcagttaccgttgaaaatcgtcttactcgataaccaacggttagggatggttcgacaatggcagcaactgttttttcaggaacgatacagcgaaaccacccttactgataaccccgatttcctcatgttagccagcgccttcggcatccatggccaacacatcacccggaaagaccaggttgaagcggcactcgacaccatgctgaacagtgatgggccatacctgcttcatgtctcaatcgacgaacttgagaacgtctggccgctggtgccgcctggcgccagtaattcagaaatgttggagaaattatcatgatgcaacatcaggtcaatgtaagcgctcgcttcaatccagaaaccttagaacgtgttttacgcgtggtgcgtcatcgtggtttccacgtctgcagtatgaatatggccgccgccagcgatgcacaaaatataaatatcgaattgaccgttgccagcccacggagcgtcgacttactgtttagtcagttaaataaactggtggacgtcgcacacgttgccatctgccagagcacaaccacaagtcaacaaatccgcgcctgagcgcaaaaggaatataaaaatgaccacgaagaaagctgattacatttggttcaatggggagatggttcgctgggaagacgcgaaggtgcatgtgatgagccacgcgctgcactatggcactagcgtttttgaaggcatccgttgctacgacagccacaaaggaccggttgtattccgccatcgtgagcatatgcagcgtctgcatgactccgccaaaatctatcgcttcccggttagccagagcattgatgagctgatggaagcttgtcgtgacgtgatccgcaaaaacaatctcaccagcgcctatatccgtccgctgatcttcgtcggtgatgttggcatgggagtaaacccgccagcgggatacagtaccgacgtgattatcgctgctttcccgtggggagcgtatctgggcgcagaagcgctggagcaggggatcgatgcgatggtttcctcctggaaccgcgcagcaccaaacaccatcccgacggcggcaaaagccggtggtaactacctctcttccctgctggtgggtagcgaagcgcgccgccacggttatcaggaaggtatcgcgctggatgtgaacggttatatctctgaaggcgcaggcgaaaacctgtttgaagtgaaagatggtgtgctgttcaccccaccgttcacctcctccgcgctgccgggtattacccgtgatgccatcatcaaactggcgaaagagctgggaattgaagtacgtgagcaggtgctgagccgcgaatccctgtacctggcggatgaagtgtttatgtccggtacggcggcagaaatcacgccagtgcgcagcgtagacggtattcaggttggcgaaggccgttgtggcccggttaccaaacgcattcagcaagccttcttcggcctcttcactggcgaaaccgaagataaatggggctggttagatcaagttaatcaataaatacaaaaaatgggacggcacgcaccgtcccatttacgagacagacactgggagtaaataaagtatgcctaagtaccgttccgccaccaccactcatggtcgtaatatggcgggtgctcgtgcgctgtggcgcgccaccggaatgaccgacgccgatttcggtaagccgattatcgcggttgtgaacagcttcacccaatttgtaccgggtcacgtccatctgcgcgatctcggtaaactggtcgccgaacaaattgaagcggctggcggcgttgccaaagagttcaacaccattgcggtggatgatgggattgccatgggccacggggggatgctttatagtctgccatctcgcgaactgatcgctgattccgttgagtatatggtcaacgcccactgcgccgacgccatggtctgcatctctaactgcgacaaaatcaccccggggatgctgatggcttccctgcgcctgaatattccggtgatctttgtttccggcggcccgatggaggccgggaaaaccaaactttccgatcagatcatcaagctcgatctggttgatgcgatgatccagggcgcagacccgaaagtatctgactcccagagcgatcaggttgaacgttccgcgtgtccgacctgcggttcctgctccgggatgtttaccgctaacagtatgaactgcctgaccgaagcgctgggcctgagccagccgggcaacggcagcctgctggcaacccacgccgaccgtaagcagctgttccttaatgctggtaaacgcattgttgaattgaccaaacgttattacgagcaaaacgacgaaagtgcactgccgcgtaatatcgccagtaaggcggcgtttgaaaacgccatgacgctggatatcgcgatgggtggaagcactaacaccgtacttcacctgctggcggcggcgcaggaagcggaaatcgacttcaccatgagtgatatcgataagctttcccgcaaggttccacagctgtgtaaagttgcgccgagcacccagaaataccatatggaagatgttcaccgtgctggtggtgttatcggtattctcggcgaactggatcgcgcggggttactgaaccgtgatgtgaaaaacgtacttggcctgacgttgccgcaaacgctggaacaatacgacgttatgctgacccaggatgacgcggtaaaaaatatgttccgcgcaggtcctgcaggcattcgtaccacacaggcattcagccaagattgccgttgggatacgctggacgacgatcgcgccaatggctgtatccgcagcctggaacacgcctacagcaaagacggcggcctggcggtgctctacggtaactttgcggaaaacggctgcatcgtgaaaacggcaggcgtcgatgacagcatcctcaaattcaccggcccggcgaaagtgtacgaaagccaggacgatgcggtagaagcgattctcggcggtaaagttgtcgccggagatgtggtagtaattcgctatgaaggcccgaaaggcggtccggggatgcaggaaatgctctacccaaccagcttcctgaaaagtatgggtctcggcaaagcctgtgcgctgatcaccgacggtcgtttctctggtggcacctctggtctttccatcggccacgtcagtccggaagcggcaagcggcggcagcattggcctgattgaagatggtgacctgatcgctatcgacatcccgaaccgtggcattcagttacaggtaagcgatgccgaactggcggcgcgtcgtgaagcgcaggacgctcgaggtgacaaagcctggacgccgaaaaatcgtgaacgtcaggtctcctttgccctgcgtgcttatgccagcctggcaaccagcgccgacaaaggcgcggtgcgcgataaaagcaaactggggggttaataatggctgacagccaacccctgtccggtgctccggaaggtgccgaatatttaagagcagtgctgcgcgcgccggtttacgaggcggcgcaggttacgccgctacaaaaaatggaaaaactgagcagccgtcttgataacgtcattctggtgaagcgcgaagatcgccagccagtgcacagctttaagctgcgcggcgcatacgccatgatggcgggcctgacggaagaacagaaagcgcacggcgtgatcactgcttctgcgggtaaccacgcgcagggcgtcgcgttttcttctgcgcggttaggcgtgaaggccctgatcgttatgccaaccgccaccgccgacatcaaagtcgacgcggtgcgcggcttcggcggcgaagtgctgctccacggcgcgaactttgatgaagcgaaagccaaagcgatcgaactgagtcagcagcaggggttcacctgggtgccgccgttcgaccatccgatggtgattgccgggcaaggcacgctggcgctggaactgctccagcaggacgcccatctcgaccgcgtatttgtgccagtcggcggcggcggtctggctgctggcgtggcggtgctgatcaaacaactgatgccgcaaatcaaagtgatcgccgtagaagcggaagactccgcctgcctgaaagcagcgctggatgcgggtcatccggttgatctgccgcgcgtagggctatttgctgaaggcgtagcggtaaaacgcatcggtgacgaaaccttccgtttatgccaggagtatctcgacgacatcatcaccgtcgatagcgatgcgatctgtgcggcgatgaaggatttattcgaagatgtgcgcgcggtggcggaaccctctggcgcgctggcgctggcgggaatgaaaaaatatatcgccctgcacaacattcgcggcgaacggctggcgcatattctttccggtgccaacgtgaacttccacggcctgcgctacgtcagtgaacgctgcgaactgggcgaacagcgtgaagcgttgttggcggtgaccattccggaagaaaaaggcagcttcctcaaattctgccaactgcttggcgggcgtagcgtcaccgagttcaactaccgttttgccgatgccaaaaacgcctgcatctttgtcggtgtgcgcctgagccgcggcctcgaagagcgcaaagaaattttgcagatgctcaacgacggcggctacagcgtggttgatctctccgacgacgaaatggcgaagctacacgtgcgctatatggtcggcggacgtccaagccatccgttgcaggaacgcctctacagcttcgaattcccggaaagtccgggcgcgctgctgcgcttcctcaacacgctgggtacgtactggaacatttctttgttccactatcgcagccatggcaccgactacgggcgcgtactggcggcgttcgaacttggcgaccatgaaccggatttcgaaacccggctgaatgagctgggctacgattgccacgacgaaaccaataacccggcgttcaggttctttttggcgggttaaggaaaaatgcctgatagcgcttcgcttatcaggcctacccgcgcgacaacgtcatttgtggttcggcaaaatcttccagaatgcctcaattagcggctcatgtagccgctttttctgcgcacacacgcccagctcaaacggcgttttctcatcgctgcgctctaaaatcatcacgcggttacgcaccggttcggggctgttttccagcaccacttccggcaacaatgccacgccacagccgagtgccaccatgcttaccatcgcttcatgcccgccaaccgtggcgtaaatcatcgggttactgattttattgcgtcgaaaccacagttcaatgcggcggcgtaccggcccctgatcggccataataaacggcaccgtactccagtccggcttctctacgctcacctgattacgcaccgggcagggcagcgcgggggcaatcagcactactgccagattctccagcatgctaaacgccactgcgccgggcaaggtttccggtttacccgcaatcgccagatccgcttcaccagtgaccaccttttccatcgcatctgccgcatcaccagtagtaagtttaatctccacgctcgggtgttccgcgcggaagcgatccagaatcggcggcagatggctgtaggcagcggtcacgctgcagaagatatgtaattcgccagagaggctcggcccttgctgatcgatggtgtggcgcaactgctgatactgcaacagcgtttgctgggcgaaaacgcgcagctcttcgcccgcttcagtcagcgtcaccgtgcggttatcgcgcacaaacagcggctgaccgagatcttcttccaggcgctgaatctgccgactgagcgtggatgggctaacgtgcatcgcccgcgcgctgcggccaaaatggcggctttccgccagatgcaggaaggttttcagatcgcgtaaatccacagggacagccctcgatgttgacgttgcaaaaattgcaatgtgacgttgtgaatatatcaatttccgcaataaatttcctgtcatatagtgaattcaatctcgcaaacgcgaaccgaacaataagaagcacaacatcacgaggaatcaccatggctaactacttcaatacactgaatctgcgccagcagctggcacagctgggcaaatgtcgctttatgggccgcgatgaattcgccgatggcgcgagctaccttcagggtaaaaaagtagtcatcgtcggctgtggcgcacagggtctgaaccagggcctgaacatgcgtgattctggtctcgatatctcctacgctctgcgtaaagaagcgattgccgagaagcgcgcgtcctggcgtaaagcgaccgaaaatggttttaaagtgggtacttacgaagaactgatcccacaggcggatctggtgattaacctgacgccggacaagcagcactctgatgtagtgcgcaccgtacagccactgatgaaagacggcgcggcgctgggctacagccacggtttcaacatcgtcgaagtgggcgagcagatccgtaaagatatcaccgtagtgatggttgcgccgaaatgcccaggcaccgaagtgcgtgaagagtacaaacgtgggttcggcgtaccgacgctgattgccgttcacccggaaaacgatccgaaaggcgaaggcatggcgattgccaaagcctgggcggctgcaaccggtggtcaccgtgcgggtgtgctggaaagctccttcgttgcggaagtgaaatctgacctgatgggcgagcaaaccatcctgtgcggtatgttgcaggctggctctctgctgtgcttcgacaagctggtggaagaaggtaccgatccagcatacgcagaaaaactgattcagttcggttgggaaaccatcaccgaagcactgaaacagggcggcatcaccctgatgatggaccgtctctctaacccggcgaaactgcgtgcttatgcgctttctgaacagctgaaagagatcatggcacccctgttccagaaacatatggacgacatcatctccggcgaattctcttccggtatgatggcggactgggccaacgatgataagaaactgctgacctggcgtgaagagaccggcaaaaccgcgtttgaaaccgcgccgcagtatgaaggcaaaatcggcgagcaggagtacttcgataaaggcgtactgatgattgcgatggtgaaagcgggcgttgaactggcgttcgaaaccatggtcgattccggcatcattgaagagtctgcatattatgaaagtctgcacgagctgccgctgattgccaacaccatcgcccgtaagcgtctgtacgaaatgaacgtggttatctctgataccgctgagtacggtaactatctgttctcttacgcttgtgtgccgttgctgaaaccgtttatggcagagctgcaaccgggcgacctgggtaaagctattccggaaggcgcggtagataacgggcaactgcgtgatgtgaacgaagcgattcgcagccatgcgattgagcaggtaggtaagaaactgcgcggctatatgacagatatgaaacgtattgctgttgcgggttaagtgcgcgctgatgccctcaccccgaccctctcccacagggagagggagaaaacactcaaggccttctcctggagaaggccttgctattagttgcggtacagcaccttaatgatgtgatatccgaactgggtgtgcagcgggccggtcggctccagtaccggacaagagaaaaccactttatcgaacgccggaaccatctgaccctggcggaattcacctaaatcaccgccgcgtttgccacttgggcaaatggagtgtttcttcgccagcttgccgaaatcggccccgttcttaatctgctcgagaagatccagagccagtttctcttcttttacaaggatatgcagtgctgctgctgtttttgccatgatcgtgccttgagtgaataattgtcaggcggcgattttagcatgatccgcagatgctaacgtaattgtcagtcagggagtggctggtacatatatggcaaaagcccggaaaatccgggcttcgcaggtccctcaaggggagaaaacttagggcctctatgggctacaaagtcattatcggggatggttattttattgtcaatttatgaggcttatggcattgatactcttgatgaccgccctctgtatgtctgcaaccaactcatgtggcaaacattgattaagataccctctgtaagtccttgctctgtttaatctgtttcgactgacttgttgtaccaggtcggctttggcccaacgaatctgctgatcaaagaattgcaggtcattgataacattactggctatttcaacatgcattccacgttttaacttgtctggtcggctgtggttgataatggaacgacgatgcatgcgttgccattaatttttccgttgagcacgacaactaacctgttttttatcatttcaggaggaatgcggccatcgtaatacgtcgtgctgaacggtccattttggctaacaggatagttaccaaagttgcattccagtatttcaccaaccttagggctgaaattaatcgccacgagtaaacctctccttagtaaactctgaaaaagtaataacacaacgttacgacccgatattttctaagtctaatggattcacgatgaactccgatttcggtcttctctctctgatttaaacatccgcagccaaccggttagcggcttacacgcggtcacattcaaatgcgattctgctacaatcctccccccgttcgaagattgagcaatacacctatgcgtctaaaccccggccaacaacaagctgtcgaattcgttaccggcccctgcctggtgctggcgggcgcgggttccggtaaaactcgtgttatcaccaataaaatcgcccatctgatccgcggttgcggttatcaggcgcggcacattgcggcggtgacctttactaataaagcagcgcgcgagatgaaagagcgtgtagggcagacgctggggcgcaaagaggcgcgtgggctgatgatctccactttccatacgttggggctggatatcatcaaacgcgagtatgcggcgcttgggatgaaagcgaacttcagcttgtttgacgataccgatcagcttgctttgcttaaagagttgaccgaggggctgattgaagatgacaaagttctcctgcaacaactgattagcaccatctctaactggaagaatgatctcaaaacaccgtcccaggcggcagcaagtgcgattggcgagcgggaccgtatttttgcccattgttatgggctgtatgatgcacacctgaaagcctgtaacgttctcgacttcgatgatctgattttattgccgacgttgctgctgcaacgcaatgaagaagtccgcaagcgctggcagaacaaaattcgctatctgctggtggatgagtatcaggacaccaacaccagccagtatgagctggtgaaactgctggtgggcagccgcgcgcgctttaccgtggtgggtgacgatgaccagagcatctactcctggcgcggtgcacgtccgcaaaacctggtgctgctgagtcaggattttccggcgctgaaggtgattaagcttgagcagaactatcgctcttccgggcgtattctgaaagcggcgaacatcctgatcgccaataacccgcacgtctttgaaaagcgtctgttctccgaactgggttatggcgcggagctaaaagtattaagcgcgaataacgaagaacatgaggctgagcgcgttactggcgagctgatcgcccatcacttcgtcaataaaacgcagtacaaagattacgccattctttatcgcggtaaccatcagagccgggtgtttgaaaaattcctgatgcaaaaccgcatcccgtacaaaatatctggtggtacgagctttttctctcgtcctgaaatcaaggacttgctggcttatctgcgcgtgctgactaacccggacgatgacagcgcatttctgcgtatcgttaacacgccgaagcgagagattggcccggctacgctgaaaaagctgggtgagtgggcgatgacgcgcaataaaagcatgtttaccgccagctttgatatgggcctgagtcagacgcttagcggacgtggttatgaagcattgacccgcttcactcactggttggcagaaatccagcgtctggcggagcgggagccgattgccgcggtgcgtgatctgatccatggcatggattatgaatcctggctgtacgaaacaagccccagcccgaaagccgccgaaatgcgcatgaagaacgtcaaccaactgtttagctggatgacggagatgctggaaggcagtgaactggatgagccgatgacgctcacccaggtggtgacgcgctttactttgcgcgacatgatggagcgtggtgagagtgaagaagagctggatcaggtgcaactgatgactctccacgcgagcaaagggctggagtttccttatgtctacatggtcggtatggaagaagggtttttgccgcaccagagcagcatcgatgaagataatatcgatgaggagcggcggctggcctatgtcggcattacccgcgcccagaaggaattgacctttacgctgtgtaaagaacgccgtcagtacggcgaactggtgcgcccggagccgagccgctttttgctggagctgccgcaggatgatctgatttgggaacaggagcgcaaagtggtcagcgccgaagaacggatgcagaaagggcaaagccatctggcgaatctgaaagcgatgatggcggcaaaacgagggaaataatcaaggccggaaaagatgcgtcagcatcgcatccggcacttactcattaatgcacttccagcggccagtggacatagctctgccactggctttcctgagcaataatctctttacccagcggatgttgggttagccaaccttgcggaagcgtcaaggtcaacagttcatggttagcctgtaatgtcatctctggcacgagatcgtcacggcgacggctggcaaaaatgatggccaggcgtagtaaacggcagagttgttctgcgacgcgcggcggtacggcattttgctgatgcaggctactgagatcgaccggattagtctggttgagcagtagcgtcgccagcaattttttctgtgcgggggtaaaaccgggaagatccagattacgcaccagataagcagcgtgttgcggcgcttgtttgaagtcaacgctcaggccgatttcatgaagctgacaggcgctgatgagcaaatcgcggcttattgcttcaagatgccattcgttttccacctgatcgaagaagttagccgcaactttggctacgcgctgtgcctgatcaatatcgatcataaagcggcgttgaatattacgcagcgtacggctgcgaatatcctgctcgacggccagatgcaacatgccgtagaccaggccttcacgcagcgcaccgcccgccagggtcatacactgaatattcagttcggtaaaaatggcgatcaggatcgccagaccactcgggaacactaacgcacgttccagcgtcagcccgtcaatctccagttcctccagccgaccgcaatgaatggctcgctgtttcaattgctgcaacttttccagggtaatgcgttcatccatcccctgtgccatcatgatttcctgtaacgcctgcacggtgccggaagcaccaacgcacactttccagccgtgataccgtaattcatcggcaaccggacgtaacacttcgcgtgccgctttttctgcagcatcaaaattttcctgccccagattacgatcggcaaaatagcgttccagccaggtgacgcagcccatgctcaggctgaacaagctggtggtttgtgcacccgtgccggttaccagttcagtactggctccgcctatatccaccaccaggcgctgatcggcaccaccagtggtgtgagcaacgccctgataaatcagacgtgcttcctcttcaccgctgatcacctgtaccggacaaccgagaatttcctgcgctttggcaataaaatcacccgcattgacggcaaggcgtaacgtcgccgtagcgacaacgcgaatttggctgggaggaatatcttgcagacgttcagcaaacaggcgcaaacattgccaaccgcgctccattgcttcattggagagggcattttcgctattcaggccagcagccagacgcactttgcgttttattcgcgtcagcgtctggatgcttccagccacctcgcgcacaaccagcatatgaaaactattgctaccgagatcaatggctgcatacaggctgctggtggaacccatactcttcatccttcaatctgtctctgtgttggctgcattctttcacctgaatcacttactacagtaagctcatcgggattcattctcttgccatcttgatacagtttgaatgattttgagtatgacattttttatttaaccactacgacgacgattacgcggagcgccagtacgacgcggaccattgcctgtgcgcgggcgcgtgaggcgcagcggttttggcagatcggtcatcaatgcgtccggattgtatttgcttaccggaatactgtgaccaatataggtctcaatagcaggcaaattcaatgcatactcttcacacgccaggctgatagagtgaccgcttgcgcctgcgcgacctgtacgaccaatacggtgaacgtaatcttcacagtcatcgggtaaatcgtagttaaagacgtgcgtcactgccggaatatgcaaaccacgcgcggcaacgtcggtggcaaccagaatatccagatcgccacgggtaaattcatcaagaatacgcagacgttttttctgcgcgacatcgcctgtcaataaaccgacacgatgaccatctgctgccaggtggccccagatctcttcacaacggtgtttggtgttggcgaaaataatcgctctgtctggccactcttcttcgatcagcgtttgcagcaaacgcattttttcttcgttagaagggtagaaaagctcttctttaatacggtggcccgttttctgttccggttccacttcaatatattcggcattgttcatctgctcgaacgccagttcacgtacccggtagctaagcgtggcggagaacagcatgttgaggcgctggtttgcaggcggcatacggcggaacagccagcggatatctttaataaagcccagatcgtacatgcgatcggcttcgtccagtaccaccacctgaatggcaccgaggttaatgtggttctgcttggcgtagtcaattaaacgccccgtggtgccaatcagaatgtcaacgccgctttccagcactttcagctgtttgtcgtagccatcaccaccgtaagccagacccagcttcaggccagtagcttccgccagcggttctgcgtcggcatggatctgcacggcaagttcacgcgtcggtgccataattaaggcacgcggctgattcaccttgcgatcggcaatcgcaggatgagagagaagataatgaaacgtactcgtaagaaacgccatcgttttcccggtaccggtttgcgcctgcccggctacgtcacgacccgccagcgtcagcggaagggccagtgcctgaatgggcgtacagttatgaaacccttttttttcaagggcttctacaaccttcggatgcagggcgaagtcggaaaacttctgttctgttaaatgtgttttgctcatagtgtggtagaatatcagcttactattgctttacgaaagcgtatccggtgaaataaagtcaacctttagttggttaatgttacaccaacaacgaaaccaacacgccaggcttattcctgtggagttatatatgagcgataaaattattcacctgactgacgacagttttgacacggatgtactcaaagcggacggggcgatcctcgtcgatttctgggcagagtggtgcggtccgtgcaaaatgatcgccccgattctggatgaaatcgctgacgaatatcagggcaaactgaccgttgcaaaactgaacatcgatcaaaaccctggcactgcgccgaaatatggcatccgtggtatcccgactctgctgctgttcaaaaacggtgaagtggcggcaaccaaagtgggtgcactgtctaaaggtcagttgaaagagttcctcgacgctaacctggcgtaagggaatttcatgttcgggtgccccgtcgctaaaaactggacgcccggcgtgagtcatgctaacttagtgttgacttcgtattaaacataccttattaagtttgaatcttgtaatttccaacgcttcccgttttatcttaaatgcgaagtgaacagatttctggcagcagtctcaatccgtcttgtcgtttcagttctgcgtactctcctgtgaccaggcagcgaaaagacatgagtcgatgaccgtaaacaggcatggatgatcctgccataccattcacaacattaagttcgagatttaccccaagtttaagaactcacaccactatgaatcttaccgaattaaagaatacgccggtttctgagctgatcactctcggcgaaaatatggggctggaaaacctggctcgtatgcgtaagcaggacattatttttgccatcctgaagcagcacgcaaagagtggcgaagatatctttggtgatggcgtactggagatattgcaggatggatttggtttcctccgttccgcagacagctcctacctcgccggtcctgatgacatctacgtttcccctagccaaatccgccgtttcaacctccgcactggtgataccatctctggtaagattcgcccgccgaaagaaggtgaacgctattttgcgctgctgaaagttaacgaagttaacttcgacaaacctgaaaacgcccgcaacaaaatcctctttgagaacttaaccccgctgcacgcaaactctcgtctgcgtatggaacgtggtaacggttctactgaagatttaactgctcgcgtactggatctggcaagtcctatcggtcgtggtcagcgtggtctgattgtggcaccgccgaaagccggtaaaaccatgctgctgcagaacattgctcagagcattgcttacaaccacccggattgtgtgctgatggttctgctgatcgacgaacgtccggaagaagtaaccgagatgcagcgtctggtaaaaggtgaagttgttgcttctacctttgacgaacccgcatctcgccacgttcaggttgcggaaatggtgatcgagaaggccaaacgcctggttgagcacaagaaagacgttatcattctgctcgactccatcactcgtctggcgcgcgcttacaacaccgttgttccggcgagtggtaaagtgttgaccggtggtgtggatgccaacgccctgcatcgtccgaaacgcttctttggtgcggcgcgtaacgtggaagagggcggcagcctgaccattatcgcgacggcgcttatcgataccggttctaaaatggacgaagttatctacgaagagtttaaaggtacaggcaacatggaactgcacctctctcgtaagatcgctgaaaaacgcgtcttcccggctatcgactacaaccgttctggtacccgtaaagaagagctgctcacgactcaggaagaactgcagaaaatgtggatcctgcgcaaaatcattcacccgatgggcgaaatcgatgcaatggaattcctcattaataaactggcaatgaccaagaccaatgacgatttcttcgaaatgatgaaacgcagttaaatttgtcttatgccaaaaacgccacgtgtttacgtggcgttttgcttttatatctgtaatcttaatgccgcgctggcgatgttaggaaaattcctggaatttgctggcatgttatgcaatttgcatatcaaatggttaatttttgcacaggactggtgggtttggaacggactttcccttctgaataaaggtcttcgtggttatacttctgctaataattttctctgagagcatgcattgtgaatttactgacagtgagtactgatctcatcagtatttttttattcacgacactgtttctgttttttgcccgtaaggtggcaaaaaaagtcggtttagtggataaaccaaacttccgcaaacgtcaccagggattgatacctctcgttggggggattagcgtttacgcagggatttgcttcacgttcggaattgtcgattactatattccgcatgcatctctctatctcgcttgtgccggtgtgcttgttttcattggcgcgctggatgaccgttttgatatcagcgtaaaaatccgtgccaccatacaggccgctgttggcattgttatgatggtgttcggcaagctttatctcagtagcctgggttatatctttggctcctgggagatggtgctcggaccgtttggttacttcctgacgctatttgccgtctgggcggccattaatgcgttcaacatggttgatggcattgatggcttgctgggcgggttgtcctgcgtcagctttgcagcaatcggtatgattttgtggttcgacgggcaaaccagcctcgcaatctggtgctttgcgatgatcgccgccatcctgccatacatcatgcttaaccttggtatcctgggtcgccgctacaaagtctttatgggtgatgcgggcagtacgctgattggttttaccgttatctggatcctgctcgaaacgacccagggcaaaacccatcccatcagcccggttaccgctttgtggataatcgccattccgctaatggatatggtggcgattatgtaccgtcgcctgcgtaaaggcatgagcccattctctcctgaccgtcagcatattcaccatttgatcatgcgtgccgggtttacttcccgtcaggcgtttgtgctgattacccttgccgcagcactgctcgcttccattggcgtgctggcagaatattctcattttgtcccggagtgggtcatgctggtgctctttttgctagcattcttcctctatggatattgcattaagcgtgcctggaaagttgctcgctttattaagcgcgtaaaacgcagactgcgtagaaatcgtggtggcagccccaatttaaccaaataaatgaggatgtgatgacacaaccaatgcctgggaaaccggccgaagacgctgaaaatgaactggatattcgtgggttgtttcgtaccttgtgggctgggaagctatggattattggcatggggctggcgtttgcgttaatcgcgctggcgtatacgttttttgctcgtcaggagtggagcagcacggcgattaccgatcgtccaacggtgaatatgctggggggatattacagccagcagcaatttttgcgtaacctggatgtccgtagtaacatggcttctgccgaccaaccaagcgtcatggacgaagcctataaagagtttgttatgcaactggccagctgggatacccgcagagagttctggctgcaaaccgactattacaaacagcggatggtgggcaacagcaaagccgatgcggcgttgctggatgaaatgattaacaacatccagtttatccccggagactttacccgcgcggtcaatgacagcgtgaagcttattgccgaaaccgcgcctgacgctaataacctgttacgtcagtatgttgcttttgccagccagcgtgcagccagccatctgaatgatgagctgaaaggcgcatgggcggcgcgtaccatccagatgaaagctcaggtgaagcgtcaggaagaggtggcgaaagccatctacgaccgccggatgaacagcattgagcaggcgctgaaaattgctgagcagcataatattagccgcagtgcgacagatgtacctgccgaggaattacctgatagtgaaatgttcctgcttgggcgtccaatgcttcaggctcgactggaaaatttacaggccgtcggtccggcctttgatctcgactatgatcagaatcgggccatgttaaacaccctgaatgttggtccaaccctggatccgcgttttcagacctatcgctatttgcgtacgccggaagaaccggtaaaacgcgatagcccacgtcgtgccttcctgatgattatgtggggcattgtcggggggctgatcggggctggtgtcgcattaacccgccgttgcagcaaataacaacactgctgcggtgagcgcaaaggcgctcgccgcttattcgaagagaatcgatgtgaaagtactgactgtatttggtacgcgcccggaagccatcaagatggcgccgttggtgcatgcgttggcaaaagatcctttttttgaggctaaagtttgcgtcactgcgcagcatcgggagatgctcgatcaggtgctgaaactcttttccattgtacctgactacgatctcaacataatgcagccaggacagggcctgacagagataacctgtcggattctggaagggctaaaacctattcttgccgagttcaaaccagacgtcgtgctggttcacggcgatacgacgacgacgctggcaaccagcctggcggcgttttatcagcgtattcctgttggtcacgttgaggctggtctgcgcacgggcgatctctatagcccgtggccggaagaggctaaccgtacattgaccgggcatctggcgatgtatcacttctctccaaccgaaacttcccggcaaaacttgctgcgtgaaaacgttgcggatagccgaatcttcattaccggtaatacagtcattgatgcactgttatgggtgcgtgaccaggtgatgagcagcgacaagctgcgtagtgaactggcggcaaattacccgtttatcgaccccgataaaaagatgattctggtgaccggtcacaggcgtgagagtttcggtcgtggctttgaagaaatctgccacgcgctggcagacatcgccaccacgcaccaggacatccagattgtctatccggtgcatctcaacccgaacgtcagagaaccggtcaatcgcattctggggcatgtgaaaaatgtcattctgatcgatccccaggagtatttaccgtttgtctggctgatgaaccacgcctggctgattttgaccgacagtggcggcattcaggaagaagcgcctagcctggggaaacctgtgctggtgatgcgcgataccactgagcgtccggaagcggtgacggcgggtacggtgcgtctggtaggcacggataagcagcgaattgtcgaggaagtgacgcgtcttttaaaagacgaaaacgaatatcaagctatgagccgcgcccataacccgtatggtgatggtcaggcatgctctcgcattctggaagcgttaaaaaataatcggataagtctatgagttttgcgaccatttctgttatcggactgggttatatcgggctgccaacggcagcagcgtttgccagtcggcaaaaacaggtaattggtgtcgatatcaaccaacatgcggttgataccatcaatcgtggcgaaatccatatcgtcgaacctgatttggcgagtgtagtaaaaactgccgtagaaggcggttttttacgagcgagcacgacgccagttgaagcggatgcctggctgattgctgtacccacgccgtttaagggcgatcatgagccagatatgacctacgttgaaagcgctgctcgctccattgcgccagtgctgaaaaaaggcgcgctggtgatccttgaatccaccagcccggtggggagtaccgagaagatggcagaatggttagcagagatgcgtccggatctcactttcccgcagcaggtgggcgagcaggcggacgtcaacattgcttactgcccggaacgcgtgttaccaggacaggtaatggtcgagctgattaaaaacgatcgcgtgattggtggtatgacgccggtttgtagcgcccgcgccagcgaactgtacaaaattttcctcgaaggtgagtgtgtcgtcactaacagccggacggcggaaatgtgtaagctcaccgaaaacagcttccgcgatgtgaatatcgcttttgctaatgaattgagcctgatttgtgccgatcaggggattaacgtctgggaactgattcgcctggcgaatcgtcaccctcgcgttaatattcttcagcctggccctggcgtgggcggtcactgcattgctgttgatccgtggtttatcgtggcacagaacccccagcaggcgcggcttatccgtaccgcgcgcgaagtgaacgatcacaaaccgttctgggttatcgatcaggtgaaagcggcggtggctgattgcctggcggctaccgataaacgcgccagtgaactgaaaatcgcctgctttggtctggcgtttaaaccgaatattgatgacctgcgcgaaagcccggcgatggaaatcgctgaactgatcgcccagtggcatagcggcgaaactctggttgttgagcctaacatccaccagttgccgaaaaaactgaccgggctttgtactctggcgcagcttgacgaggcgctggcaacggcagacgtgctggtgatgctggtcgatcatagtcagttcaaagttatcaatggcgacaatgtccatcagcagtatgtcgtcgatgccaaaggagtctggcgctgatgagaaaaattctgataacaggtggtgccgggtttattggcagcgcgctggtgcgttatatcatcaacgaaacgagcgacgcggtggtagtggtcgataagctgacctacgccggaaacctgatgagcctggcaccggtcgcgcaaagcgagcgctttgcctttgagaaagttgatatctgcgatcgggcagaactggcacgcgtattcactgagcatcagccagactgtgtcatgcatctggcagccgaaagccatgttgaccgttctattgacggcccggcagcgtttattgaaaccaacattgtcgggacttatacattgcttgaagcggcgcgggcttactggaatgcgctgacggaagataaaaaaagtgcgttccgttttcatcatatctccactgacgaagtatatggtgacctgcacagcacggatgatttcttcaccgaaaccacgccgtatgcgccgagcagcccttattccgcgagtaaagccagcagcgaccatctggtgcgcgcctggctgcggacctatggtctgccgacgcttatcaccaactgcagcaataactacggcccttaccactttccggaaaaactgatcccgctgatgatcctcaacgcgctggcgggtaaaagcctgccggtatatggcaacgggcagcaaatccgtgactggctgtatgtggaagatcacgcccgcgcgctgtattgcgtggcgaccaccgggaaagtcggtgaaacctataatattggtggtcacaacgagcgtaagaatctcgatgttgtggaaaccatttgcgagctgctggaagaactggctccgaacaagccgcacggcgtggcgcactatcgtgacctgatcacctttgtcgctgaccgtccggggcatgatctgcgttatgccattgatgctagcaaaattgcccgtgaacttggctggctgccgcaggaaacctttgaaagtggaatgcgtaaaacggttcagtggtatctggctaatgaaagctggtggaagcaggtgcaggacggcagctatcagggcgagcgtttaggtctgaaaggctaattttcagcggaggcaaacatgaaaggtattatcctggcgggcggttccggcacccgattgcatccgattacgcgcggcgtaagcaagcaactgttgccgatttacgataagccaatgatttactatccgctgagcgtgctgatgctggccggtatccgcgaaattctcatcatcactacgccggaagataaaggttatttccagcgcctgctgggcgatggtagtgagttcggtatccagctggaatatgccgaacagcccagcccggacggtctggcgcaggcctttatcatcggtgaaaccttccttaatggtgaaccttcttgtctggtgctgggcgataacatcttcttcggtcagggcttcagtccgaagctgcgtcatgttgcggcgcgcaccgaaggggcgacggtttttggctatcaggtgatggacccggaacgctttggcgtggtggagtttgacgacaatttccgcgctatcagcctggaagaaaagccaaaacagccgaagagtaactgggcggtgaccgggctttatttctacgacagtaaagtcgtggagtacgcaaagcaggtgaagccgagcgagcgtggtgaactggagattacctccatcaaccagatgtacctcgaggcgggcaacctgaccgttgaactgctcgggcgcggatttgcctggctggataccggcactcacgacagcctgattgaagccagcacctttgtacagacggtggaaaaacgccagggctttaagattgcctgcctggaagagattgcctggcgtaacggctggctcgatgacgagggtgtgaagcgtgctgccagtagtttagcgaaaactggctacggccaatatctgctggagttacttcgtgcccgtccgcgccagtattgagccactaacctgggaaaacgccttctttggtgttaacagcgccatcgtgcgcattacgtctgaagcaccgctcctgacgccagacgcgttagcgccgtggtcacgggtgcaggccaaaattgcggcaagtaatacgggtgaactggatgccctgcaacagctgggattctccctggtagaaggtgaagttgatttggcgctacccgtgaacaatgccagtgatagcggtgctgtagtggcacaagagaccgatattcccgcattacgtcagttagccagcgccgcatttgcgcaaagccgttttcgtgcgccgtggtatgcgcctgacgccagcagtcgcttttatgcacagtggattgaaaatgccgtgcgcggcacctttgatcatcaatgtctgattttacgtgcggcgtccggcgatattcgcggctatgtctctttacgggaactcaatgcgacagatgcgcgaattggcctgctggctggacgcggtgcaggtgctgagctgatgcaaacggcgctaaactgggcgtatgctcgcggtaaaacaactttgcgggtggcgacccaaatgggcaacaccgccgcgcttaaacgatacatacaaagtggtgcgaatgtagaaagcaccgcgtactggttatacaggtgatcacatgattccatttaacgcaccgccggtggtgggaaccgaactcgactatatgcagagcgcaatgggtagcggcaaactgtgtggcgatggcggttttacccgtcgctgccagcagtggctggagcaacgttttggcagcgccaaagtgttactgacgccgtcctgcaccgctagcctggagatggcggcgctgctgctcgatatccagcctggcgatgaagtgatcatgccgagctacacctttgtctccaccgccaatgcctttgtgctgcgtggcgcaaaaatcgtttttgtggatgttcgcccggacaccatgaacatcgacgaaacgctgattgaagcggcgatcaccgacaaaacgcgcgttatcgtgccggtccattacgcgggtgtggcctgcgaaatggacaccattatggcgttggcgaaaaagcataatttgtttgtggtagaagatgccgctcagggcgtgatgtccacttacaaagggcgtgcactgggaaccattggtcatattggctgctttagcttccatgaaaccaaaaactacacggcgggcggtgaaggcggcgcgacgctgattaacgataaagcgttaatcgaacgagccgagatcatccgtgaaaagggcactaaccgcagccagttcttccgtggtcaggtcgataaatatacctggcgcgatattggctccagctatttgatgtccgatctgcaagctgcatacctgtgggcgcaactggaagcagcggatcgtatcaaccagcaacgtctggcgctgtggcaaaactactacgatgcgttagcgcctctggcgaaagccgggcgtatcgagctgccgagcattcccgatggctgcgtgcagaacgcgcatatgttctacattaaactgcgggatattgatgaccggagcgcgttgattaactttctgaaagaagcggaaatcatggcggtgtttcattacattccgctgcacggttgccctgcgggggaacactttggtgagttccacggtgaagatcgctacaccaccaaagagagcgagcgcctgctgcgcctgccgctgttctacaacctgagccccgtcaatcagcgtacggtaattgcgactttgttgaactacttttcctgatatgagcttggcaaaagcgtccttgtggacggcggccagtacactggtcaagattggtgccgggttactggtcggtaagttgctggcggtgagttttggtccggcggggcttgggctggcggcaaatttccgccagttgattaccgtgctcggcgtgcttgccggggctggcatctttaacggtgtaaccaaatacgttgcccagtaccatgataatccgcaacagctgcgccgcgtggtcggcactagtagtgcgatggtacttggtttctctacgctgatggcgctggtttttgtgctggcagctgcgccaatcagccagggattgtttggtaataccgactatcaggggctggtgcgtttagtggcgctggtgcaaatggggatcgcctggggcaacctgttactggcgctgatgaaaggctttcgcgatgccgcaggtaatgcgttaagcctgattgtcggcagcttgattggcgttctcgcgtactacgtcagttaccgtttgggcggttatgaaggggcgttgctgggtctggcgctgattcccgcgctggtggtaattcctgccgccatcatgttgatcaaacgtggtgtcatcccgttaagctatctgaaacccagctgggataacggtctggcagggcagttgagcaaatttacgctcatggcgttgattacgagcgtgaccttgcctgttgcttacatcatgatgcgtaaactgctggcggcgcagtatagctgggatgaggtggggatctggcaaggggtgagcagtatttccgatgcctacctgcaatttattacggcaagcttcagcgtatatttgctgcccacgttgagccggctaacggaaaagcgcgatatcacccgggaagtggttaaaagcctgaaattcgtcttaccggcagtggcggcggcgagttttaccgtctggctgctgcgtgattttgctatctggctgctgttgagcaataaatttaccgctatgcgcgatctctttgcctggcagttagtgggtgatgtgttaaaagtgggcgcttatgtctttggttatctggtgatcgccaaagcgagtctgcggttttatattctggcggaagtcagccagttcactttattgatggtatttgcccactggctaatccctgcgcatggtgcactgggcgcggcgcaggcatatatggcaacttatatcgtctatttttctctttgttgtggcgtgtttttactctggcgtaggcgggcatgactgtactgattcacgtactgggaagcgatatccctcaccataaccgaaccgttttgcggtttttcaatgacgcgctggccgcgacgagcgagcacgcgcgcgagtttatggttgttggcaaggacgacggcttaagtgatagctgtccggcgctttctgtgcaatttttccctgggaaaaaaagcctggcggaagcggtcatcgcgaaagcaaaagctaaccgtcagcagcgttttttcttccacggtcagttcaatcccacactgtggctggctctgctgagtggtggcattaagcccagccagtttttctggcatatctggggggcagacctgtatgagctttccagtggcttgagatataagcttttttacccactacgtcgcctggcgcaaaagcgagtcggctgtgtatttgccacccgcggcgatttgagcttttttgccaaaacgcacccaaaggtgcggggcgaactgctgttcttcccgacgcggatggaccctagcctcaatacgatggcgaacgatcggcaacgtgaagggaaaatgaccattctggtggggaactccggcgaccgcagcaatgagcatattgctgccttgcgcgccgttcatcagcaatttggcgatacggtaaaagtggtggtgccgatgggatatccgcctaataacgaagcgtacattgaggaagttcgtcaggcggggctggagttattcagcgaagaaaatctacaaattctgagcgaaaaactggaatttgacgcctatctggcgctacttcgtcagtgcgatcttggttactttatttttgcccgccagcagggcattggtacgctgtgcttactgattcaggcgggcattccttgtgtgcttaaccgggaaaatccgttctggcaggatatgacggaacaacatttgccggtgctgtttactaccgacgatctcaacgaggatattgtgcgtgaagcgcagcgccagttggcgagcgtggataaaaacaccattgccttctttagccctaactatctacaaggctggcagcgggcgttggcgattgccgccagggaggtcgcatgagtctgctgcaattcagtggcctgtttgttgtctggctgctctgcacgctgtttattgccacgctgacctggtttgagtttcgccgtgtgcgctttaacttcaatgtcttctttagtttgctgtttttgctcacctttttcttcggcttcccgctgaccagcgtgctggtatttcgctttgatgttggtgtcgcgccgccagaaatcttgttgcaggcgttgctttctgcgggctgcttctacgcggtttactatgtcacctacaaaacccgcctacgcaaacgcgttgctgatgtaccgcgccgtccgctgtttaccatgaaccgcgtggagaccaatcttacgtgggtgatcctgatgggtatcgcgctggtaagcgtcggcatcttcttcatgcacaacggctttttgctgttccggcttaactcctacagtcagatcttttccagtgaagtctccggcgtggcgttaaaacgcttcttttactttttcatcccggcgatgctggtggtctactttctgcgccaggacagcaaagcgtggctgtttttcctcgtcagcacggtcgcctttggcttgctgacttatatgattgtcggcggcactcgcgccaatatcatcatcgcattcgctatcttcctgtttattggcattattcgcggctggattagcttgtggatgctggcggcggcgggcgtgctggggattgttggcatgttctggctggcactaaaacgctatggaatgaatgtgagcggcgatgaagcgttctatacgtttctctatctcactcgcgacaccttcagcccgtgggagaatctggcgttgctgttgcagaactacgacaacatcgacttccagggcctggctccaattgtccgcgatttctatgtctttatcccttcctggctgtggccgggtcgcccgagtatggtgctgaacagtgccaactactttacctgggaagtgctgaataaccactccggactggcgatcagccctacgcttataggcagtctggtggtgatgggcggcgcgttgttcatcccgctcggggcgatcgtggttggtctgatcatcaaatggttcgactggctgtatgagctgggcaaccgcgagcctaatcgctataaagctgcgatattgcacagtttctgctttggggcgatcttcaatatgatcgtgctggcgcgtgaagggctggatagctttgtcagtcgcgtggtcttttttatcgtggtcttcggcgcatgtctgatgatcgcaaaactgttgtactggctttttgaaagcgccggactcattcataaacgtacaaaaagtagcctccggacgcaggttgaaggataacaatgaataacaacaccacggcaccaacctatacgctgcgtggcttacagttgattggttggcgtgatatgcagcacgccctcgattatctgtttgctgacgggcagcttaagcagggaacgctggttgccattaatgctgaaaaaatgctgactattgaagataacgccgaggtcagggagttaattaacgctgccgaatttaaatatgcggatggcatcagcgttgtacgtagtgtacgtaaaaagtacccgcaggcgcaggtttcccgcgttgccggtgccgatctctgggaagagctgatggcgcgcgcaggcaaagaagggacgccggtatttcttgtgggcggtaaacctgaagtgctggcgcaaactgaagctaaactgcgcaaccagtggaatgtgaatatcgttggcagtcaggatggttattttaaacccgagcagcgtcaggcgctgtttgaacgcattcatgccagcggtgcgcaaatcgtcaccgttgcgatgggaagcccaaagcaggagatcatcatgcgcgactgccgtctggtacatccagatgcgctgtatatgggcgttggcgggacttacgatgttttcaccggtcacgtaaaacgcgcaccgaaaatctggcaaacgctggggctggagtggctctaccgcctgcttagccagccgagccgcattaagcgtcagcttcgtttgctgcgttatttacgctggcactacaccggcaacctatgattttcctctctttgtaaagcgacggagtggtcactccgtcgcctgtctgcttttttattacacaaagcattcaaatttttaatgctttatttgccatttctcctgaattacgaaaacatttgcaacactcgatgtacccataacgataaccggtaacaccggaaagcatgcaaacacaacacgaggatttatggcagataacaaaccagagctacagcgtgggctggaagctcgacatatcgaactcatcgccctggggggcaccattggcgtcggcctgtttatgggggccgccagtaccctgaaatgggccgggccatccgtattgttggcctatatcatcgccgggctgttcgtctttttcatcatgcgtagtatgggcgaaatgttgttcctcgaaccggttaccggtagcttcgccgtttatgcgcatcgttatatgagcccgttctttggctatctcaccgcctggtcttactggtttatgtggatggcggtggggatctctgaaatcaccgccattggcgtttatgtccagttctggttcccggagatggcgcagtggatacccgcattgatcgcagtggcgctggtggcgttggcgaatctggcggcggtgcggttgtacggcgaaatcgagttctggttcgcgatgatcaaagtcaccacgattatcgtgatgattgtcattggcctgggcgtgattttctttggctttggcaatggcgggcagagcattggttttagcaatctcacagagcatggcggtttctttgcgggtggctggaaagggttcctgaccgctctgtgtattgtggtggcgtcctaccagggcgtggagctgattggcattactgccggtgaagcgaagaatccgcaggtgacgctgcgcagtgccgtaggcaaggtgctgtggcggatcctgattttctacgtaggcgcgattttcgttatcgtcaccatcttcccgtggaatgaaataggcagcaacggcagcccgttcgtactgacttttgccaaaatcggtattaccgcagcggcgggcattatcaactttgtggtgctgacggctgcgctctctggctgtaacagcggcatgtacagttgcggacgtatgctctacgcactggcgaaaaaccgtcagttaccggcggcaatggcgaaagtttcccgtcacggcgtaccggttgcgggtgtggcagtatctattgctattctgctaattggcagttgcctgaactacatcattcccaatccgcagcgtgtgtttgtctacgtctacagtgccagcgtgcttccggggatggtgccatggtttgtgatattgataagccagctgcgttttcggcgtgcacataaagcggcgattgccagccatccgttccgcagtatcctgttcccgtgggccaattacgtaacaatggcattcctgatttgcgttttgatcggcatgtactttaatgaagatacgcgtatgagcctgtttgttggcatcatctttatgctggcggtgacggcgatttataaagtttttggccttaatcgccacgggaaagcgcataaactggaggaataagcagcaaaacgcacaaaccgtaaccaaacgcgcaatttatttaaaaagggactagacagaggggtgggaagtccgtattatccacccccgcaacggcgctaagcgcccgtagctcagctggatagagcgctgccctccggaggcagaggtctcaggttcgaatcctgtcgggcgcgccatttagtcccggcgcttgagctgcggtggtagtaataccgcgtaacaagatttgtagtggtggctatagctcagttggtagagccctggattgtgattccagttgtcgtgggttcgaatcccattagccaccccattattagaagttgtgacaatgcgaaggtggcggaattggtagacgcgctagcttcaggtgttagtgtccttacggacgtgggggttcaagtcccccccctcgcaccacgactttaaagaattgaactaaaaattcaaaaagcagtatttcggcgagtagcgcagcttggtagcgcaactggtttgggaccagtgggtcggaggttcgaatcctctctcgccgaccaattttgaaccccgcttcggcggggttttttgttttctgtgcatttcgtcaccctcccttcgcaataaacgcccgtaataactcattgccccacggtatgatttcgcccttaacgtattgaaggatgacttcaggcaaggagcgaccatgctgcaacaggttccaacgcgtgcttttcatgtgatggcgaaaccgagcggttccgattgtaatctgaactgtgactactgtttttatctcgaaaaacaatccctttaccgcgaaaagccagtcacgcatatggacgatgacacgctggaagcgtatgtccgtcactatatcgctgccagcgaaccgcaaaacgaagtggcttttacctggcagggcggcgaaccaacgctactcgggctggcgttttaccgccgtgccgtagcgctacaggcgaaatatggtgctggcaggaagataagtaacagcttccagactaacggcgtgctgctggatgacgaatggtgcgcgtttctcgcggagcatcattttcttgttggtttaagcctggatggcccgcctgagatccacaatcaatatcgcgtgactaaaggtggcagacccacgcataagctggtgatgcgtgccctgacgctcctgcaaaaacatcatgtcgactataacgtgctggtctgcgttaatcgcaccagcgcgcagcaaccgttgcaggtatatgattttttgtgcgatgcgggagtcgaattcatccagtttattccggtggtcgagcgcctggctgatgaaacaactgcccgcgatggacttaagttacatgcgcctggtgatattcagggtgagctaacggaatggagcgtgcgccccgaggagttcggtgagtttctggtggcgatattcgaccactggatcaaacgcgacgtcggcaagattttcgtgatgaatatcgaatgggcgtttgccaattttgtcggtgcgccgggtgcggtttgccatcatcagccaacctgtgggcgcagcgtgattgttgagcacaacggcgacgtttacgcctgtgatcactatgtttatccgcaatatcggctggggaatatgcaccagcaaacaattgcagaaatgatcgattccccgcaacagcaggcgtttggtgaagataaatttaagcagttaccggcgcagtgtcgcagttgtaacgtgttaaaagcgtgctggggaggctgcccgaaacaccgcttcatgctcgatgccagcggcaaaccgggactgaattatttgtgtgccgggtatcagcgttatttccgccatctaccgccatatcttaaagcaatggctgatttgctggcgcacggtcgcccggccagcgacattatgcatgcgcatttgctggtggtgagtaagtaaaaatcggcggccgcctgcggttgattgccggatgcggcgtaaacgccttatccggcctacatgatcgtgcaaattcaataaattgcagcgttctgtaggctggataagatgcgtcagcatcgcatccggcaaaggcagatctcagcgatagcgccggcttagtcagatttaatctgcgcgcgtggtggatattttttcaggatctccatatacgcgtgcatttcggtctgtagcggtacacccatcggaatatggcgcacgccgatggagtcgctttcctgcggatcggtgtagaggttaaacacgctgcttcccgccgtttgcattactgtgccggtgaatccaccctgatatccgctctgggtataagcgtaaggttgctgaatcaggacgtgatacttgaactcatccatacgcacagcagcgagtttaccgttgaggaagtagtgctcggccttacggttagactgaccatttgttcccaggaagaaggatgtctggtccacaccatcgataaaggtggttttcggcactaaattcgccactttcgctccaggatgccctgccagatccagcgcggtagggaagagatctgccagatcgacaataccgtcagatttacgcggttggatcatccctttccagtaaacgaaagtcggtacgcgaacgccgccttcccaggtgctacctttcgcaccacggaacggggtgcgtccgtgcggcggtacttcggcttccggtccgttatcggaggtaaagacgatcagcgtgttatcaagctgaccgtttttctccagtgttttatacagattagcgaacacatcgttcatctccaccatgcagtcgccatagctggtgcgtgccggagagctacccgcatatttcgcatttgggtagttatcgaagtggcagccacgagtgccgtagtagaggaagaatggtttatcgctcttcgccatcttgtcgaggaacttaacgccatagtccatccagcgttgatccagatcttccatatatttcggcgtaatgtcggcaatggcctgttgttcgccgccgcgcaccgcatgaacgtcatctttgctgaacggtaattgcttgatgtattcagaacggtccggactcagggccacttccggattgacgtgaacgtcgcgccattcggtgtacatatcagacacgctgttaaagccacggaaatcatcaaagccaacgttctgcggctggctctctttgttttcccccatatgccattttccgatggcctgagtgacgtagccctgatcgtgcagcaactgcggcagcgtggttaacccttgcagcccgcccggttgcccgtacattggcggcatcagaatgccgtggtggatggagtattgtccggtgagaatggtggcgcgggttggggaagagcttggttgagaatacgcgctagttaaaatcagcccctggctggcaacggcgtcgatatctggtgtagggttacccaccgccacgccgccaccgttaaaaccgacgtccatccagcccacatcgtccagcaagaaaacaaccacattcggtttcttaccggtttttttctcaagttctgccagcttctgctgggtttctttatcctgcgccggatgctgcattactggcatcatattgtcggcaatagtggtcgccggtttaaccagatactggtttgggtgatcgtatccggcaaagcctttgcgtgcggtggcagtactcggggtatctgctgcgctggccatgagaggaagagcggcggcgacagcaacaacaagacgtttgggactaaagctaaattccatgcaaaatgctccggtttcatgtcatcaaaatgatgacgtaattaagcattgataattgagatccctctccctgacaggatgattacataaataatagtgacaaaaataaattatttatttatccagaaaatgaattggaaaatcaggagagcgttttcaatcctacctctggcgcagttgatatgtaaggcaggtttattatatcgcgttgattattgatgctgtttttagttttaacggcaattaatatatgtgttattaattgaatgaattttatcattcataataagtatgtgtaggatcaagctcaggttaaatattcactcaggaagttattactcaggaagcaaagaggattacagaattatctcataacaagtgttaagggatgttatttcccgattctctgtggcataataaacgagtagatgctcattccatctcttatgttcgccttagtgcctcataaactccggaatgacgcagagccgtttacggtgcttatcgtccactgacagatgtcgcttatgcctcatcagacaccatggacacaacgttgagtgaagcacccacttgttgtcatacagacctgttttaacgcctgctccgtaataagagcaggcgtttttttatgtatcaggaaggccccggaggtgcttgcctccgggtgagaaggaattactgtggcgggttattctgcaacgttaacatcaaaccgtcgcgacgcatagctgcagcttcttccggcttgtgcagtctgtccagcgcgtcggcaagccatgcgtaatcgtaggcgtccggacgttgtttcagcgctgcgcggaaggcgaggcttgcttcctgccattctccgtgcttcatcagactctggcccagtgtgctccacaacagcgggcgatcgccgacgtttttgatttgctggcgcagcactttttccagctgttccggattgtttgttttcagtcgaggaatcggcagcagtaggcgatcgtcgtactggcgtttcaggccatcgatgataatttgctgggcagtatcatgatcgtcacattcaataagatgttccgccattgccacctgcaacgctacctgatgacgcgttttccggctttggtttttccaccagttacgcaaaccttcgctaccgttatcggcacgcgcctgatccatcaggccaatccatgcctgttgttccagcattgcacgatgttcttcatcaccaacatgggctttcgccatacttgggataatatccagcaggctactccatgcacctgtgcggatatacgcctgttccgccagacgtaatacttccggatggcgtggcgtaacttccagcagcttatccacgccgtggcgtgcagcatggttttcattacgggccagttgcagacgtacgcgggtgatttctaccggaatggtgtcgttgccggccagctccgctgcgcgttccagatgttggttggcgcgtgcttcatcaccacgttgttgcgcggcttcggcagccagtagatagttcaccaccggttgttccgcgtgatcggcatttttcgccatcagcttttcaacttgctgataatcgccttccgccagtttcagcagcgcctgttcggtctgcttacgtgcacggcgacgcttacgtccgacaaaccacccacgggtgtgcgcgccagtgcggaagatccgccgcagtagccactcaatggcaaacagcactaccatcgccagaatcaatatgatcgccaggcccgtgacgctggtttcgatattgtagttgtcggtctggatcagcacataaccctgatggccggcaatcatcgggccaaccacgatccccgcaatcagcaacacaaagagcaataacacttttagcatggttattctccttgcggcgcggctgccggagtatcagcttgcggtgcaggtgcaggtttagcttccgttgtccccgctgccggttgtgccagcaggttacgcacgcgagtctgcatcagtttttccagcatcgcctggctttgcagggtttccggaagatccatgctgatattttgctggcttaactggtccacctcgtcgaggaacgctttggtggtggcatcatcagtatcgtagtaagcacgtacccaggtggagacgttctccagcgcctggcgataagtctcttcctggtgacgcggtacagcttgtgctgcgaccagcaggcgagagcgaatattttcgcgcagatagatatcctgatttggcgctaacagcggtacggcggtgtcatcacgacggcgaatcgtaatgaagttgtccataaagttctgccagcttttttgcagattgatacgccattcgctgatggaactggaaagctcttcaccgtcactatccatcgggctaccatcgctgtcattatcggccagacgcaggttatctacctgattactaagctgattaagcttaaggatgatgccgtcataatccacctggcttactgcagaaaggctggcgatatcatcggtaattgcccgacgaacggtaatcagactcgggtcattcatatccgccaggctggcgtctgcacttttcagcaacgctgcagcggtcgtgacgtcctgatcgctccacagcttccgtccggcgagtttcaccagaaaatcggcctgagccagcagccaggttttagcatcgctgccggaaatggtggcgaccttttgttggacttcatccaactgttttgccagcgtttcttgctgacgattcgcctgcttaagttgtgcagcttgttgcttaataatgccttccagctcggctttttggctctcctgggctttttgcaatgccgtcagttggttagccagggcatcgctggtggcggtctgattgacggcctgttgtttaccccagccatacaaaccgatgcccgccgccagagcaatagcgatagccaccgcgctgagaatcaatgcggtattgttcttactctttttttctgttgcgacaggttgactcgtggtgtccacggcctccctggtctcttcaaccacggcggaggttttttcttgttccgtcattatggcttcctgttatgagagttattgtaatgcccgtaaaagcgcatcgttgtcagcgttatcggcgaccttaatgtcttgccagcccagttcccgggcgagtttcgccaaacgctcactgacgaccaatagtcgacagtgtagtaaccagtgctcacgataccattgtgggatcaggctccagagttgctgcaacatttcaccgctggtaacaacgaccatcgtcacctcgcgggcttgccagcgcatcgcttcttctgcaccatcgtaatggattgcgcatcgttgataacattcacaaaaagtgacctcagcaccgcgcgccgtcagggtatccccaattagctcacgaccaccattgccacgtaatatcagcgcacgtttgcccgcaatattttgtaattcaggtaattgtagcaagacttcgctgatttcccgatcctgcgggtagagaatcttctgtccacttacggtatgtagtgccagtgcggtggtgcgtccaatggcgaaataatcaggtagtcggggccatttacgatcttgctgatgcagctgactttgggcaaaagcaaccgcgtgttggctgagggcaaacaacagatcgctctcccccagcgctgccagttgatcagcaagttgcggtaattgttgacccggagaaaactcaatcagcggaaaatgccaggccacctgccccagtgtgcgcagacggctcactaactcttctccagcgggagacgggcgggtgacaaggatactcatgccggggcgtctccgttatagacttcagcgaggatctcgcgcgcgccgttattcagtagctcttctgccaggctaatccccatttgttcggcatcttgcggcgcaccgcggcgttcaccgcgaataatctggctaccgtccggcgcgccgaccagcgcacgcagccagatttcgccatcaataagctcggcgtagctaccaattggcacctgacatccgccttcgagacgggtattcatggcgcgttctgcggtaacgcgcagtgcagtttcgtggtgattcagcgcggcaagcagctcgcgagtgcgactatcatcaaggcggcattcaatacccaccgcaccttgtcctaccgccggaagagaaatctcgggtggcaacgcggcgcgaatacgactctccagacctaaacgttttagtccggctacggcaagaatgatggcatcgtattcgccgttatccagtttgctcaggcgagtgccgacgttgccgcgcagggagcggataatcagatccggacggcgttcagccagttggcactggcgacgtaaactggacgtcccgacgatactgcctgccggtaacgcatccagactgtcatagttattggacacaaaggcatcgcgaggatcttcacgctcacaaatagtgaccagtcccagaccttgcgggaattcaaccggcacatctttcatactgtgtacggcgatatcggcgcgattttcgaggagcgcgacttccagctcttttacaaataagccttttccgcctactttcgccagcggcgtatcaagaatcacatcgccgcgcgtcaccatcggtaccagttcaacgaccaggcccggatggctcgccatcaacttgtctttgacatagtgtgcctgccagagtgcaagtgggctttggcgtgtggcaattcttaaaacattgtctaacatgcttgttaccgtcattatcatccgtggtccatcctaacatccttgccagagtgatgtcagtgttgtggtgaaacgtagacgcctgcgcaaaccgtaaaatgaggtctggcagtggatcctgacaggcgtttcacgccgttgtaataaggaatttacagagaataaacggtgctacacttgtatgtagcgcatctttctttacggtcaatcagcaaggtgttaaattgatcacgttttagaccattttttcgtcgtgaaactaaaaaaaccaggcgcgaaaagtggtaacggttacctttgacatacgaaatatcccgaatgccgcgtgttaccgttgatgttggcggaatcacagtcatgacgggtagcaaatcaggcgatacgtcttgtacctctatattgagactctgaaacagagactggatgccataaatcaattgcgtgtggatcgcgcgcttgctgctatggggcctgcattccaacaggtctacagtctactgccgacattgttgcactatcaccatccgctaatgccgggttaccttgatggtaacgttcccaaaggcatttgcctttacacgcctgatgaaactcaacgccactacctgaacgagcttgaactgtatcgtggaatgagtgtacaggatccgccgaaaggtgagcttccaattactggtgtatacaccatgggcagcaccagctccgtagggcaaagttgttcctctgacctggatatctgggtctgtcatcaatcctggctcgatagcgaagagcgccaattgctacaacgtaaatgtagcctgctggaaaactgggccgccagcctgggtgtggaagtcagcttcttcctgattgatgaaaaccgcttccgtcataatgaaagcggcagcctggggggcgaagattgtggctccacccagcatatactgctgcttgacgaattttatcgtaccgccgtgcgtctcgccggtaagcgtattctgtggaatatggtgccgtgcgacgaagaagagcattacgacgactatgtgatgacgctttacgcgcagggcgtgctgacgccaaatgaatggctggatctcggtggcttaagcagcctttctgctgaagagtactttggtgccagcctttggcagctctacaagagtatcgattccccatacaaagcggtactgaaaacactgctgctggaagcctattcctgggaatacccgaacccacgtctgctggcgaaagatatcaaacagcgtttgcacgacggcgagattgtaagctttggtctcgatccatactgcatgatgctggagcgtgttactgaatacctgacggcgattgaagattttacccgtctggatttagtacgtcgctgcttctatttaaaagtgtgcgaaaagctcagccgtgaacgcgcctgcgtaggctggcgtcgcgcagtgttgagccagttagtgagcgagtggggttgggacgaagctcgtctggcaatgctcgataaccgcgctaactggaagattgatcaggtgcgtgaggcgcacaacgagttgctcgacgcgatgatgcagagctaccgtaatctgatccgctttgcgcgtcgcaataaccttagcgtctccgccagtccgcaggatatcggcgtgctgacgcgtaagctgtatgccgcgtttgaagcattaccaggtaaagtgacgctggtaaacccgcagattagtcccgatctcagcgaaccgaatctgacctttatttatgtgccgccgggccgggctaaccgtagtggttggtatctgtataaccgcgcgccaaatattgagagcatcatcagccatcagccgctggaatataaccgttacctgaataaactggtggcgtgggcatggtttaacggcctgctgaccagccgcacccgtttgtatattaaaggtaacggcattgtcgatttgcctaagttgcaggagatggtcgccgacgtgagccaccatttcccgctgcgcttacctgcaccgacaccgaaggcgctctacagcccgtgtgagatccgccatctggcgattatcgttaacctggaatatgacccgacagcggcgttccgcaatcaggtggtgcatttcgatttccgtaagctggatgtcttcagctttggcgagaatcaaaattgcctggtaggtagcgttgacctgctgtaccgcaacagctggaacgaagtgcgtacgctgcacttcaacggcgagcaaagcatgatcgaagccctgaaaactattctcggcaaaatgcatcaggacgccgcaccgccagatagcgtggaagtcttctgttatagccagcatctgcgcggcttaattcgtactcgcgtgcagcaactggtttctgagtgtattgaattgcgtctttccagcacccgccaggaaaccgggcgtttcaaggcgctgcgcgtttctggtcaaacctgggggttgttcttcgaacgcctgaatgtaagcgtacagaaactggaaaacgccatcgagttttatggcgcgattagccataacaaactgcacggcctgagtgtgcaggttgaaaccaatcacgtcaaattaccggcggtggtggacggctttgccagcgaagggatcatccagttctttttcgaagaaacgcaagacgagaatggctttaatatctacattctcgacgaaagcaaccgggttgaggtatatcaccactgcgaaggcagcaaagaggagctggtacgtgacgtcagtcgcttctacagcagtagccatgaccgttttacctacggcagtagcttcatcaacttcaacctgccgcagttctatcagattgtgaaggttgatggtcgtgaacaggtgattccgttccgcacaaaatctatcggtaacatgccgcctgccaatcaggatcacgatacgccgctattacagcaatattttagctgatgaacgtgccggaaagcgaggcttatccggcatgcaatcttagcggaaactgactgtttcacccgcctgctgcgtcgccgcctgttccagcaaatcccagaaggtttcgccgctgcgatcacaaatccactcatcgcctttcaggtcaaaatggtagccgccctgtttggttgccagccatacctggtgcagcggctcctggcggttgataatgattttgctgccattctcaaaggtaatggtcagtacgccgccgttgatttcgcagtcgatatcgctgtcgccatcccagtcgtccaggcgttcttcaatggtcagccagagttgatcagccaggcgatgaaattcactgtcgttcattgttgtatcctgtttttaagtgatggcggcagtatagcggcatggggtcagggcttcaaagtttgcacctctgcggctgcgttccggcacgatagttccgtcaccggaataatgatgtctctgtgtagcgaaagatttgtctctagtttagggcgcagttacaccacgtctttccctgtttctggtaaacattatgatcaggtttaccgagcgagcatcctcacgctgacggaactaaaaaagacaacaaacaaaccacattgcgatagtgcataaagccatcctggcgcgaggtgccgatcacgaaactaccagcaaaacataaatccccacgagtaagcgttatactcgcagcatttcctcacttttcagacttcataaagagtcgctaaacgcttgcttttacgtcttctcctgcgatgatagaaagcagaaagcgatgaactttacaggcaatccataatgaaaaacgtgtttaaggcactcactgtattacttactctcttcagcctgacgggctgcggtctgaaaggtccgctctatttcccgcctgcagataaaaacgcaccgccgccgaccaaaccggtagagacgcaaacgcaatccacggtgccggataaaaacgatcgcgccactggcgatggtccatcccaggtgaattactaaaagtcagtttctgtacccgcgtgattggagtaaatgatgcagttcagcaaaatgcatggccttggcaacgattttatggtcgtcgacgcggtaacgcagaatgtcttttttagtccggagctgattcgtcgcctggctgatcggcacctgggggtagggtttgaccaactgctggtggttgagccgccgtatgatcctgaactggattttcactatcgcattttcaatgctgatggcagtgaagtggcgcagtgcggcaacggtgcgcgctgctttgcccgttttgtgcgtctgaaaggactgaccaataagcgtgatatccgcgtcagcaccgccaacgggcggatggttctgaccgtcaccgatgatgatctggtccgcgtaaatatgggcgaacccaacttcgaaccttccgccgtgccgtttcgcgctaacaaagcggaaaagacctatattatgcgcgccgccgagcagacaatcttatgcggcgtggtgagcatgggaaatccgcattgcgtgattcaggtcgatgatgtcgataccgcggcggtagaaacgcttggtcctgttctggaaagccacgagcgttttccggagcgcgccaatatcggttttatgcaagtggttaagcgcgagcatattcgtttacgcgtttatgagcgtggggcaggagaaacccaggcctgcggcagcggcgcgtgtgcggcggttgcagtagggattcagcaaggtttgctggccgaagaagtacgcgtggaactccccggcggtcgtcttgatatcgcctggaaaggtccgggtcacccgttatatatgactggcccggcggtacatgtctacgacggatttattcatctatgaagcaaccaggggaagaactgcaggaaacactcacggagcttgatgaccgggcggttgtcgattatctgattaaaaatcctgagttttttatccgtaatgcgcgcgcagtagaagcgatacgtgtgccgcatccggtacgcggcaccgttagcttggtcgagtggcacatggcccgcgcacgtaatcatattcatgttctggaagagaacatggcgctgttgatggaacaggctatcgccaacgaaggcctgttttatcgcctactctacctgcagcgcagtctcaccgccgccagcagtctcgacgatatgctgatgcgctttcaccgctgggcgcgcgatctcggcctggcaggtgcgagtctgcgcctgtttccggatcgctggcgcttaggtgcgccgagcaaccacactcatctggcattaagccgtcagtctttcgaaccgctgcgtattcagcgtttggggcaggaacagcactatcttgggccgcttaacggaccagagctgctggtggtgctaccggaagcgaaagcggtgggaagcgtggcgatgagcatgctgggaagcgatgctgatttgggtgtcgtgctgtttaccagtcgcgatgccagtcactatcaacaagggcaaggaacgcagttacttcatgaaattgcgctgatgttgccggagcttctggagcgttggattgaacgcgtatgaccgatttacacaccgatgtagaacgctacctacgttatctgagcgtggagcgccagcttagcccgataaccctgcttaactaccagcgtcagcttgaggcgatcatcaattttgccagcgaaaacggcctgcaaagctggcagcaatgtgatgtgacgatggtgcgcaattttgctgtacgcagtcgccgtaaagggctgggagcagcaagtctggcgttacggctttctgcgctacgtagcttttttgactggctggtcagccagaacgaactcaaagctaacccggcgaaaggtgttagcgcaccgaaagcgccgcgtcatctgccgaaaaacatcgacgtcgacgatatgaatcggctgctggatattgatatcaatgatcccctcgctgtacgcgaccgtgcaatgctggaagtgatgtacggcgcgggtctgcgtctttctgagctggtggggctggatattaaacacctcgacctggagtctggtgaagtgtgggttatggggaaaggcagcaaagagcgccgcctgccgattggtcgcaacgctgtggcgtggattgagcactggcttgatttgcgcgacctgtttggtagcgaagacgacgcgctttttctgagcaaactgggcaagcgtatctccgcgcgtaatgtgcagaaacgctttgccgaatggggcataaaacaagggctgaataatcacgttcatccgcataaattacgtcacagcttcgccacgcatatgctggagagcagcggcgatcttcgtggtgtgcaggagctgctgggtcatgccaacctctccaccacgcaaatctatactcatcttgattttcaacaccttgccagcgtgtacgatgcggcgcatccacgcgccaaacgggggaaataatgcgtttttaccggcctttggggcgcatcagcgcgctcacctttgacctggatgataccctttacgataaccgtccggtgattttgcgcaccgagcgagaggcgcttacctttgtgcaaaattatcatccggcgctgcgcagcttccagaatgaagatctgcaacgcctgcgccaggcggtacgggaagcggaacccgagatttatcacgacgtgacgcgctggcgttttcgtagcattgaacaagcgatgctcgacgccgggctgagtgccgaagaagccagtgcaggcgcacacgcagcaatgatcaactttgccaaatggcgcagccgaatcgacgtcccgcagcaaactcacgacaccttaaaacagctggcgaagaaatggccgctggtggcgatcaccaacggtaacgcccagccggagctgtttggtttgggggattattttgagtttgtgctgcgcgctggcccgcacgggcgcagtaaaccgttcagcgatatgtactttttggctgcggaaaaactcaacgtgccgatcggcgagatcttacatgttggggacgatctcaccactgacgtgggtggggcaattcgcagcggaatgcaggcttgttggatcagaccggaaaatggcgatctgatgcaaacctgggacagccgtttactgccgcatctggaaatttcccggttggcatctctgaccagcctgatataatcagcaaatctgtatatatacccagctttttggcggagggcgttgcgcttctccgcccaacctatttttacgcggcggtgccaatggacgtttcttacctgctcgacagccttaatgacaaacagcgcgaagcggtggccgcgccacgcagcaaccttctggtgctggcgggcgcgggcagtggtaagacgcgcgtactggtgcatcgtatcgcctggttgatgagcgtggaaaactgcagcccatacagcattatggcggtgacgtttaccaacaaagcggcggcggagatgcgtcatcgtatcgggcaactgatgggcacgagccagggcggtatgtgggtcggcaccttccacgggctggcgcaccgtttgctgcgtgcgcaccatatggacgccaatctgccgcaggatttccagatcctcgacagtgaagaccagctacgcctgcttaagcgtctgatcaaagccatgaacctcgacgagaagcagtggccgccgcggcaggcaatgtggtacatcaacagccagaaagatgaaggcctgcgtccgcatcatattcaaagctacggtaatccggtggagcagacctggcagaaggtgtatcaggcgtatcaggaagcgtgtgaccgcgcgggcctggtggacttcgccgagctgctgctgcgcgctcacgagttgtggcttaacaagccgcatatcctgcaacactaccgcgaacgttttaccaatatcctggtggacgaattccaggataccaacaacattcagtacgcgtggatccgcctgctggcgggcgacaccggcaaagtgatgatcgtcggtgatgacgaccagagtatctacggctggcgcggggcgcaggtggagaatattcagcgtttccttaatgatttccccggtgccgaaactattcgtctggagcaaaactaccgctctaccagcaatattctgagcgccgctaacgccctgattgaaaacaataacgggcgtctgggtaaaaaactgtggaccgatggcgcggacggtgagcctatttccctctattgcgcttttaacgaactcgatgaagcgcgttttgtggttaaccgcatcaaaacctggcaggacaacggcggagcgcttgccgagtgcgccattctctaccgcagcaacgcccagagccgggtgctcgaagaggcgttattgcaggccagtatgccgtaccgtatttacggcgggatgcgcttcttcgaacgccaggaaatcaaagatgcgctcagctatctgcgcctgattgccaaccgcaacgacgacgcggcctttgagcgtgtggtgaatacgccaacgcggggtattggtgaccggacgctggacgtggtacgtcagacaagccgcgatcgccagttaacactctggcaggcatgtcgtgagctgttgcaggaaaaagccctcgccgggcgagctgccagcgccttgcagcgatttatggaattaatcgacgccttagcgcaggaaactgccgatatgccgctgcatgtacagactgaccgggtaattaaagactccggcctgcgtaccatgtatgagcaggagaagggcgaaaaaggtcagacgcgtatcgaaaacttagaggaactggtgacggcaacgcgccagttcagctacaacgaagaagacgaagatttaatgccgctgcaggcgttcctctcccatgcggcactggaagcaggtgaagggcaggcggatacctggcaggatgcggtgcagttgatgacgctacacagcgcgaaaggcctggagttcccgcaggtgtttatcgttggtatggaagagggcatgttcccaagccagatgagcctggatgaaggcgggcgtctggaagaagaacgccgtctggcctacgttggcgtaacccgcgcgatgcagaaactgacgctgacctacgcggaaacccgccgtctgtatggtaaagaggtttaccatcgcccgagccgctttatcggcgagctgccggaagagtgtgtggaagaggtgcgcctgcgcgccacggtaagccgcccggtcagccatcagcggatgggtacgccgatggtcgagaacgacagcggctacaagctcggccagcgcgtacgccacgctaagtttggtgaaggcaccattgtcaatatggaaggcagcggtgagcatagccgtttgcaggtggcatttcagggccagggtattaaatggctggtggcggcatacgcccggctggagagcgtgtaacgttgccggatgcggtgctgcgcaccttatttggcctaaaaaatcattcagattcaataaattgcaacgtcatgtaggccggatagggcgtttacgccgcatccggcatctgcgccatcttcagtatctgacacaaaactatcgttttaacctttccgctcgacggaaatcatggtgacaaaaggatagcgttgccacgggattgccccgcctttcatatacatatgactaatcgtgccatcaagataaagcagctgctcaacgttcagtttcgctttggcataacaggcaaaatcataaaaatttgttgcctgctggctcaacaaaaacacggcgttcccatgtttattaatcccaacaccgttacgaattttgctactggcgacgttgggatgaatacgcggattaattacaccgttttccatcaacattggcccactctgcaccgcaaactgaatctctttactggttttgaaggcatccagacgaacgatgccgactttatctcccgcgacataaaacacgccgccaggacggataaagaaattcccttcaccactagcgagatttaacgccaccttctgctgaccgttttcgatgtacaaaccgagcggcgcatagctttcatcatagatgccgccgttcatcgccatctgcacctgaccctgactattaatatccgccagcagagcatgtaacgttccccacgcttcgccattggctttttgccagtacattttcacccgctctgtttgaggattaacggtatacgcctgtacggtcagcgtcggatcactgagtgcgcaatcatcagcggcaacagcaaacaagggaagtaaggtgagggcgagaaaaatccgtttgagattcaaggtgatcattcctttaccaatgagtagctgatgcgccattataggtcctggatgtgggatttttttatcctgttagcgaccttgacgagtaccaaaaagcgcgaagttcaactattgttctgtggtgttctgttgcgtgttgacggcaaaattttgctggcgtaacatgcgcgcacgatcactctaagaggacattcgccttggacacacccagtagatactggctcactatcctgtcatccaggatcaactcctaaggctatccctttttgctgatagccttagcggttgtcagcgacctcaatttttcccgtcgcgctgagtcaggctgtttaatggtctgaaacccaatttgtttctgtgtgcccaccgaactgtccgatattttaagcattgggagtcccggtcatgctgagcgcatttcaactggaaaataaccgactgacccggctggaagtcgaagagagtcaaccccttgtaaatgcagtatggattgatcttgtcgaaccggacgacgacgagcgactgcgcgtacaatctgaacttggccagagcctggcaacccgcccggaactggaagacatcgaagcaagcgcacgtttctttgaagacgacgacggcctgcatattcactccttcttcttctttgaagatgcggaagatcacgccggtaactccactgtggcatttaccatccgtgatggtcgtctgtttactctgcgtgagcgtgaactgcccgcttttcgtctgtatcgtatgcgtgcccgtagccagagcatggtagacggtaacgcctacgagttgctgctggatctgttcgaaaccaaaatcgaacagttggcagatgaaattgaaaatatctatagcgacctggagcagttgagccgggtgattatggaagggcatcagggcgatgagtacgacgaggcgctctccactctggcggaactggaagatatcggctggaaagttcgcctgtgtctgatggatacccagcgcgcgctcaacttcctggtgcgtaaagcgcgtttaccgggtgggcaactggagcaggcgcgtgaaatcctgcgagatatcgaatccctgctgccgcataacgaatccctgttccagaaggtgaacttcctgatgcaggcggcaatgggttttatcaacatcgagcagaaccgcatcatcaaaatcttcagcgtggtatccgtggtattcctgccgccgacgctcgttgcttccagctatggcatgaactttgagtttatgccagaactgaagtggagcttcggctaccctggcgcgattatctttatgatcctcgcgggcctggcaccgtatctgtactttaagcggaagaactggttgtaaaaaacgagagcggtggcttagtctggctaagccacctgttattcaaaggctccaggtatttaacccttttacctctttctcatagaaccatttgttcgtgttaacagcaacataggctgctacggcaattcccagaatgttaacgccaattagtgcaccaacaaatagagatagaataccaagtaatagaactataattgcttttttccataaccccaggacaaataaatatatccaggaacagaagaaagcaatgaaattcatttgaatagttaagcgttgtcttacttttaatgctttaaatgctgctttatattctggtgttgccccccagaatccaggaaaaccatgttgatcataaaaattaaatcggtatttccatttttcacttaaactaccatcgttcatatattccttactcataaatactccataattattgtttactactatcagtaggtgcaagcattagcatactgaaagtggaaaaataacaaatcaaaaaaatcatgctaccattgccactacaggcaaaatcttcggctatcattgtgatgatagagatgatatatactgctaatgtaccaaaaacataagtttttatatagatgaaaccactatcacggagtcgctggcaattcatgttgatgacgagataatggagtacgatggtagagactataacaagaaagcctgcttctccatcgttaaaaaagataataagaaaggcaaaaatgaaatttattaaaataaaactaaatatataacgacgtctggaaatcttaccgttagatgttgggataaatatacgtaacataaattttacatccttgtatgagtctccggtcagcatggcaatatgcccactctcatgcaagagtcggcatattttttcagaatatatttattttttatttggacgttctacgctgcgtataaatcgcatccatcacaaaaattgccagcgccacccaaataaaggcgaaagtcaccatcttatcggcacccggtttttcaccataaaacgtcacagccagcaggaacatcagcgtcgggccaatgtactggaaaaagcctaacgtactgagacgcaagcgcgtggcagcggcggtaaaacacaacagcggtacggtagtgacaataccggcggcgatcagcagtaaattcaggctcatcgggttttgccccatatggctggtactgctgtcggcaatagcaaacaggtaaattgccgccacgggcagcagccacatggtttcgattaacatgccggtttgcgcttcaacggcaatcttcttgcgtaccagaccgtagaaggcaaaactaaatgccagtcccagcgcgataataggtaggctaccaaaagtccacagctggactaacacgccacatatcgccagaatcaccgccagccattgcatccggcggaatcgctcgccgaggaaaatcatccccagcacaatgttcaccagcgggttaataaagtaaccaaggctcgcttccagcatatggtgattgttcaccgcccagataaacagtagccagttgccaccaatcagcacggcagagactgccagcataaaaattttctgtggcgtctgaatcagcgtttttaaataggaccactggcggcaaatgctcatcagcaccaccataaagaaaaagctccagatcacgcgatgcgtcaggatttcatcggcgggcacgtagtaaatcaacttgaagtacgctggcgctataccccaaataaaataagcggcaagagcgagtaatacgccctgccgcgtttgttttgcatccatcgggaatactcatttttaattggtaacagcagtttacctgcttttatgtcttcaacctaccatataggtggcggtggcactggcaatataaagctgttcttcattgtgtaattcaacgcgggcgacggcgactttattgcctgcacgcaacaggctactagtagcagtaaaacgctcgcccctgcctgggcgcagataatcaacgcgaagatcaatggtccccatccggcttagccgctggcgtagttcatcttcactgatggtttcgtggcgggttaaggtacttcccacgcacaccagaccggcggcgacatccagcgcgctcgcaatgaccccgccgtgcaaaatgctttgcgcccagttgcccaccatcattggctgatttttaaaggccagctgtgcgaactctttttcgtaacgctccagttccatccccaatgcgcggttaaatggcatgtgataaacaaacatctcacccactaatttcagggcttgttcagcggtcagtacggcagacatatcatccttacacttcattggttaatgaaatgttgattttatgcttctttgttgttggtttctactttaggaagggataactaacggctatggagttaagtatgtaaaatagcccgcagaaaaatattcaccttatcaataattcgttacggagaacacgaccgatgcggactctgcagggctggttgttgccggtgtttatgttgcctatggcagtatatgcacaagaggcaacggtgaaagaggtgcatgacgcgccagcggtgcgtggcagtattatcgccaatatgctgcaggagcatgacaatccgttcacgctctatccttatgacaccaactacctcatttacacccaaaccagcgatctgaataaagaagcgattgccagttacgactgggcggaaaatgcgcgtaaggatgaagtaaagtttcagttgagcctggcatttccgctgtggcgtgggattttaggcccgaacagcgtgttgggtgcgtcttatacgcaaaaatcctggtggcaactgtccaatagcgaagagtctagtccgtttcgtgaaaccaactacgaaccgcaattgttcctcggttttgccaccgattaccgttttgcaggttggacgctgcgcgatgtggagatggggtataaccacgactctaacgggcgttccgacccgacctcccgcagctggaaccgcctttatactcgcctgatggcagaaaacggtaactggctggtagaagtgaagccgtggtatgtggtgggtaatactgacgataacccggatatcaccaaatatatgggttactaccagcttaaaatcggctatcacctcggtgatgcggtgctcagtgcgaaaggacagtacaactggaacaccggctacggcggcgcggagttaggcttaagttacccgatcaccaaacatgtgcgcctttatactcaggtttacagcggctatggcgaaagcctcatcgactataacttcaaccagacccgtgtcggtgtgggggttatgctaaacgatttgttttgatgaacggttgagtggttggcaaatctggaatccagcatccaggattaccctctcagagactaaaagcattgcagtttctcgcgcaggcgctgaaaatagcgcctgtttttatttcaggcaatcggggtgaatgtggcgcaggcggaagtgttgaatctggagtccggagctaaacaggttttacaagaaacctttggctaccaacagtttcgccccggccaggaagaaattatcgacactgtgctttccggccgcgattgcctcgtcgtcatgcccactggtggcggaaaatccctttgctatcaaatccctgccttattgctaaacggccttaccgtggttgttagtccgctgattagcttgatgaaagatcaggtggatcaactgcaagccaacggcgtggcggcggcgtgccttaacagcacgcaaacccgcgaacagcaacttgaagtgatgacaggctgccgcaccgggcaaattcgtctgctttatatcgccccggaacgcctgatgctggataactttcttgagcatctggcgcactggaatccggtgttattagccgttgatgaagcgcactgtatctcccaatggggccacgatttccgcccggaatatgccgcgctcggtcagttgcgccagcggttcccgacgctgccgtttatggcgctgaccgccacagccgacgacaccacgcgccaggatatcgtgcgcctgctggggctgaacgatccgctgattcaaatcagcagttttgaccgtccgaatattcgctacatgctgatggagaagttcaaaccgctcgatcagttgatgcgctacgtgcaggaacagcgcggtaagagtggcattatctactgcaacagccgcgcgaaagtagaagacaccgctgcgcgcctgcaaagcaagggaattagcgcggcggcctatcatgccgggctggaaaataatgttcgcgccgatgtgcaggaaaaattccagcgcgatgacctgcaaattgtggtggcgacggtggcgttcggcatgggcatcaataaaccaaacgttcgcttcgtggtccactttgatattccgcgcaatatcgaatcctattatcaggaaaccggacgcgccgggcgtgatggcctgcccgcggaagcgatgctgttttacgatccggctgatatggcgtggctgcgccgttgtctggaagagaagccgcaggggcagttgcaggatatcgagcgccacaaactcaatgcgatgggcgcgtttgccgaagcgcaaacttgccgtcgtctggtattgctgaactattttggcgaagggcgtcaggagccgtgcgggaactgcgatatctgcctcgatccgccgaaacagtacgacggtagtaccgatgctcagattgccctttccaccattggtcgtgtgaatcagcggtttgggatgggttatgtggtggaagtgattcgtggtgctaataaccagcgtatccgcgactatggtcatgacaaactgaaagtctatggcatgggccgtgataaaagccatgaacattgggtgagcgtgatccgccagctgattcacctcggcctggtgacgcaaaatattgcccagcattctgccctacaactgacagaggccgcgcgcccggtgctgcgcggcgaatcctctttgcaacttgccgtgccgcgtatcgtggcgctcaaaccgaaagcgatgcagaaaagcttcggcggcaactatgatcgcaaactgttcgccaaattacgcaaactgcgtaaaagcatagccgatgaaagtaatgtcccgccgtacgtggtgtttaacgacgcaaccttgattgagatggctgaacagatgccgatcaccgccagcgaaatgctcagcgttaacggcgttgggatgcgcaagctggaacgctttggcaaaccgtttatggcgctgattcgtgcgcatgttgatggcgatgacgaagagtaatcagcagcataaaaaagtgccagtatgaagactccgtaaacgtttcccccgcgagtcaaatgtatgttgatgttatttctcaccgtcgccatggtgcacattgtggcgcttatgagccccggtcccgatttcttttttgtctctcagaccgctgtcagtcgttcccgtaaagaagcgatgatgggcgtgctgggcattacctgcggcgtaatggtttgggctgggattgcgctgcttggcctgcatttgattatcgaaaaaatggcctggctgcatacgctgattatggtgggcggtggcctgtatctctgctggatgggttaccagatgctacgtggtgcactgaaaaaagaggcggtttctgcacctgcgccacaggtcgagctggcgaaaagtgggcgcagtttcctgaaaggtttactgaccaatctcgctaatccgaaagcgattatctactttggcagcgtgttcagtttgtttgtcggtgataacgttggcactaccgcgcgctggggcatttttgcgctgatcattgtcgaaacgctggcgtggtttaccgtcgttgccagcctgtttgccctgccgcaaatgcgccgtggttatcaacgtctggcgaagtggattgatggttttgccggggcgttatttgccggatttggcattcatttgattattagccggtgatgccagacgcgtcttcagagtaagtcggataaggcgtttacgccgcatccgacattatttttcacgcatgcctcgcgcttgctaacagcgctcccaccagcataaacaagctgccgaaaatcttattcagcgccttcatctgctttggtcctttaatccatagagcaatccgttgagcaagggtggcgtaaccgatcatcacaataatatcgaccacaatagtggtgacgccgagcacgatatactgcatcagttgcggctgttgcggcatgatgaattgcggaaatagcgccgccagaaacacaatacttttgggattggtgagattcacaaaaactgcgcgctggaacaaatgtcgacggctttgagtagaggccaggcttttaaggtcaattgcaccagcggcgcgccactgctggattcccagccaaatcaagtaagccgcgcctgcccacttcaacacttcaaacgcaatcacactgcgggaaaatagcgtccccaaccccacgccaaccagcacaatatgaatcgccagtccggtctgaagcccagcaatagacgccaccgcgccgcgataaccgtggttgaggctggtggtcatagtgttgattgcaccagagcctgggctcaggcttaaaatgatgcttgtcagcaggtaggcaaaccaccattctaaggtcatgatgaactcccggtgtgtctatttttgtgccacaatacgctactgtcgcagcgttgtgtcaggcacgctaaaaaaaacgattttacgtggtttaagaggcagattacccgatgtttcagcagcaaaaagactgggaaacaagagaaaacgcgtttgctgcttttaccatgggaccgctgactgatttctggcgtcagcgtgatgaagcagagtttactggtgtggatgacattccggtgcgctttgtccgttttcgcgcacagcaccatgaccgggtggtagtcatctgcccggggcgtattgagagctacgtaaaatatgcggaactggcctatgacctgttccatttggggtttgatgtcttaatcatcgaccatcgcgggcagggacgttccggtcgcctgttagccgatccgcatctcgggcatgttaatcgctttaatgattatgttgatgatctggcggcattctggcagcaggaggttcagcccggtccgtggcgtaaacgctatatactggcacatagcatgggcggtgcgatctccacattatttctgcaacgccatccaggtgtatgtgacgccattgcgctaactgcgccaatgtttgggatcgtgattcgtatgccgagttttatggcacggcagatcctcaactgggccgaagcgcatccacgtttccgtgatggctatgcaataggcaccgggcgctggcgcgcgttgccgtttgctatcaacgtactgacccacagcagacagcgatatcgacgtaacttacgcttctatgctgatgacccaacgattcgcgtcggtgggccgacctaccattgggtacgcgaaagtattctggctggcgaacaggtgttagccggtgcgggtgatgacgccacgccaacgcttctcttgcaggctgaagaggaacgcgtggtggataaccgcatgcatgaccgtttttgtgaactccgcaccgccgcgggccatcctgtcgaaggaggacggccgttggtaattaaaggtgcttaccatgagatcctttttgaaaaggacgcaatgcgcagtgtcgcgctccacgccatcgttgattttttcaacaggcataacagtcccagcggaaaccgctctacagaggtttaaatttcttatgtaccaggttgttgcgtctgatttagatggcacgttactttctcccgaccatacgttatccccttacgccaaagaaactctgaagctgctcaccgcgcgcggcatcaactttgtgtttgcgaccggtcgtcaccacgttgatgtggggcaaattcgcgataatctggagattaagtcttacatgattacctccaatggtgcgcgcgttcacgatctggatggtaatctgatttttgctcataacctggatcgcgacattgccagcgatctgtttggcgtagtcaacgacaatccggacatcattactaacgtttatcgcgacgacgaatggtttatgaatcgccatcgcccggaagagatgcgcttttttaaagaagcggtgttccaatatgcgctgtatgagcctggattactggagccggaaggcgtcagcaaagtgttcttcacctgcgattcccatgaacaactgctgccgctggagcaggcgattaacgctcgttggggcgatcgcgtcaacgtcagtttctctaccttaacctgtctggaagtgatggcgggcggcgttagtaaaggccatgcgctggaagcggtggcgaagaaactgggctacagcctgaaggattgtattgcgtttggtgacgggatgaacgacgccgaaatgctgagcatggcggggaaaggctgcattatgggcagtgcgcaccagcgtctgaaagaccttcatcccgagctggaagtgattggtactaatgccgacgacgcggtgccgcattatctgcgtaaactctatttaagctaatcgttctttatttggtcagttgtcaacctgatacttcgctacaatggatacccgttaatcaaagagttttccattgtggcgctacttatcatcaccacgattctgtgggccttctcctttagcttttatggcgagtaccttgcggggcacgtcgatagctattttgcggtgctggtgcgcgttggcctggcggcactcgtttttctgccgtttctgcgtacccgtggcaatagcctgaaaacggtcggcctgtatatgctggtgggcgcgatgcagcttggcgtgatgtatatgctgagtttccgcgcttatctctacctgacggtttccgagctgctgctgttcaccgtgctgacgccgctctacatcacgctgatttatgacatcatgagtaagcgccgtctgcgctggggctatgcctttagcgccttgctggcggtgattggtgccgggattattcgctatgatcaggtcaccgaccatttctggactggcttgctgctggtgcaactctccaatatcacttttgccattggcatggtgggttacaaacgcctgatggaaactcgcccgatgccacagcataacgcctttgcgtggttctatcttggcgcgtttctggtggcagtgattgcatggttcttgctgggaaatgcgcagaaaatgccgcaaaccacgctgcaatggggcattctggtgtttcttggcgtggtggcttccgggattggctactttatgtggaactacggcgcgacgcaggtggacgccggaacgctgggcattatgaataatatgcacgttccggcagggctgctggtaaacctggctatctggcaccaacagccgcactggccaacgtttattacaggcgcgctggtgatcctggccagtctgtgggtgcatcgtaagtgggtcgctccgcgctctagtcaaacggcagatgatcgcaggcgtgattgcgcgctgagcgaataattacaggcgcgctggacttcctggcctcactgtgggtgcatcgtaagtgggtcgctccgcgctcttcacaaacggcagatgatcgcaggcgtgattgcgcgcactgcgaataaacgcttccgtaactggctgacgctgctcgccatcgcgcacggcggcgtacagtcggctccacaagccttcgcccagggttttggtcaccaccagaccctggcgctcaaaactctctactacccaatgcggtagcgcggcaatacccatccgcgcggcaaccatctgaatcaacaataaggtgttatcgacgcttttcagactcgggctgacgcctgccggctgaagaaaatgccgccagacatccagtcgactacgctgcaccggataaattaatagcgtctcgctggcgagatcttccggtgtaattcgcgttttcgccgccagtggatggtcaggtgctaacaccagacgcacttcatagtcgaacatcgggctataatgcaggccactgcgcggcagaatatcggacgtcattaccagatccagctctccctgttgcaaggcgggctgcgggtcaaatgtcacgccgcttttaaaatccatctctacctgcggccagttcttatggaaattttctaacgcgggtgtcagccactgaatacagctatggcactcaatggcaatgcgcagacgcgtctgctgcggttcattgcaggcttgcagggcctggctaatttgcggcagtacctggtttgccagttgcaacaggatttctccctgcggtgtaaagcgtagcggctggctcttacgcacaaatagccggaagccaaggcgttgttccagatcgctaaactggtgagacagggcggattgcgtctgatgcaacgtcgccgcagcggctgcgaggctgccgcagttccgcaacgcttgtagcgttttcaggtgttttacttcgatcatgaaagtccttcacttcggcatgaataatttgcgcttgaggaatatacagtaaccgccaattatggatgtgtaaacatctggacggctaaaatccttcgtcttttaaatttatggtgcgttggctgcgtttctccaccccggtcacttacttcagtaagctcccggggatgaataaacttgccgccttccctaaattcaaaatccataggatttacatataattagaggaagaaaaaatgacaatattgaatcacaccctcggtttccctcgcgttggcctgcgtcgcgagctgaaaaaagcgcaagaaagttattgggcggggaactccacgcgtgaagaactgctggcggtagggcgtgaattgcgtgctcgtcactgggatcaacaaaagcaagcgggtatcgacctgctgccggtgggcgattttgcctggtacgatcatgtactgaccaccagtctgctgctgggtaacgttccggcgcgtcatcagaacaaagatggtagcgtagatatcgacaccctgttccgtattggtcgtggacgtgcgccgactggcgaacctgcggcggcagcggaaatgaccaaatggtttaacaccaactatcactacatggtgccggagttcgttaaaggccaacagttcaaactgacctggacgcagctgctggacgaagtggacgaggcgctggcgctgggccacaaggtgaaacctgtgctgctggggccggttacctggctgtggctggggaaagtgaaaggtgaacaatttgaccgcctgagcctgctgaacgacattctgccggtttatcagcaagtgctggcagaactggcgaaacgcggcatcgagtgggtacagattgatgaacccgcgctggtactggaactaccacaggcgtggctggacgcatacaaacccgcttacgacgcgctccagggacaggtgaaactgctgctgaccacctattttgaaggcgtaacgccaaatctcgacacgattactgcgctgcctgttcagggtctgcatgttgacctcgtacatggtaaagatgacgttgctgaactgcacaagcgcctgccttctgactggttgctgtctgcgggtctgatcaatggtcgtaacgtctggcgcgccgatcttaccgagaaatatgcgcaaattaaggacattgtcggcaaacgtgatttgtgggtggcatcttcctgcagcttgctgcacagccccatcgacctgagcgtggaaacgcgtcttgatgcagaagtgaaaagctggtttgccttcgccctacaaaaatgccatgaactggcactgctgcgcgatgcgctgaacagtggtgacacggcagctctggcagagtggagcgccccgattcaggcacgtcgtcactctacccgcgtacataatccggcggtagaaaagcgtctggcggcgatcaccgcccaggacagccagcgtgcgaatgtctatgaagtgcgtgctgaagcccagcgtgcgcgttttaaactgccagcgtggccgaccaccacgattggttccttcccgcaaaccacggaaattcgtaccctgcgtctggatttcaaaaagggcaatctcgacgccaacaactaccgcacgggcattgcggaacatatcaagcaggccattgttgagcaggaacgtttgggactggatgtgctggtacatggcgaggccgagcgtaatgacatggtggaatactttggcgagcacctcgacggatttgtctttacgcaaaacggttgggtacagagctacggttcccgctgcgtgaagccaccgattgtcattggtgacattagccgcccggcaccgattaccgtggagtgggcgaagtatgcgcaaagcctgaccgacaaaccggtgaaagggatgctgacggggccggtgaccatactctgctggagcttcccgcgtgaagatgtcagccgtgaaaccatcgccaaacagattgcgctggcgctgcgtgatgaagtggccgatctggaagccgctggaattggcatcatccagattgacgaaccggcgctgcgcgaaggtttaccgctgcgtcgtagcgactgggatgcgtatctccagtggggcgtagaggccttccgtatcaacgccgccgtggcgaaagatgacacacaaatccacactcacatgtgttattgcgagttcaacgacatcatggatagcattgcggcgctggacgcagacgtcatcaccatcgaaaccagccgttccgacatggagttgctggagagctttgaagagtttgattatccaaatgaaatcggtcctggcgtctatgacattcacagcccaaacgtaccgagcgtggaatggattgaagccttgctgaagaaagcggcaaaacgcattccggcagagcgcctgtgggtcaacccggactgtggcctgaaaacgcgcggctggccagaaacccgcgcggcactggcgaacatggtgcaggcggcgcagaacttgcgtcgggggtaaaatccaaaccgggtggtaataccacccggtcttttctcattacaggctcttcttcccaccatactgcttaaaccattccagcatacgctgccagccatcttctgcagatgcggcatgatagctcgggcgataatcagcgttgaatgcatgcccggcgtccgggtacacgataatctctgctttcgcattagcagcccgcagcgcctggcgcatggtttcaacgctctcctgcggaatgctgttatcctgaccaccatataagccgagaatcggcgcgttaagatcggttgcgatatcaacaggttgtttcggactattcaggctcttgtcgcccgtcagtttgccgtaccacgccactgcggcttttagctgtggattatgcgcggcatacagccaggtgatacgtccaccccagcagaatccggtgatcattaaacgatgaacatcgccgccgttgcgggaagcccaactggcgacatgatcgagatcggccagcacctggctgtcaggcacttttgctaccagaccgctaagcaacgtggggatatcggcaaaatcattcggatcgccttcgcggaagtaaagttcaggtgcgatagccagatacccctccagcgccagacggcgacaaatgtcgcggatatgttcatgcacgccaaaaatttcctgcactacaatgaccactggcagtgggccatcgctttgctttggtctggcatggtaagcaggcatgttatccccttgactagggatagaggtgaagcccgccacaatcgcgtcgtccggggtctgaacgatggtgctagcgagagggcttgcagcaggtgcaaatccagattgttgtgttgttgccatggtattctccgtacccttataaaaatgttgcgcaatgttaactatagtcagcatgcaacaaatcacattgcctgaatcggctcatcttttatgcagtcctgcagaatgaagggtgatttatgtgatttgcatcacttttggtgggtaaatttatgcaacgcatttgcgtcatggtgatgagtatcacgaaaaaatgttaaacccttcggtaaagtgtctttttgcttcttctgactaaaccgattcacagaggagttgtatatgtccaagtctgatgtttttcatctcggcctcactaaaaacgatttacaaggggctacgcttgccatcgtccctggcgacccggatcgtgtggaaaagatcgccgcgctgatggataagccggttaagctggcatctcaccgcgaattcactacctggcgtgcagagctggatggtaaacctgttatcgtctgctctaccggtatcggcggcccgtctacctctattgctgttgaagagctggcacagctgggcattcgcaccttcctgcgtatcggtacaacgggcgctattcagccgcatattaatgtgggtgatgtcctggttaccacggcgtctgtccgtctggatggcgcgagcctgcacttcgcaccgctggaattcccggctgtcgctgatttcgaatgtacgactgcgctggttgaagctgcgaaatccattggcgcgacaactcacgttggcgtgacagcttcttctgataccttctacccaggtcaggaacgttacgatacttactctggtcgcgtagttcgtcactttaaaggttctatggaagagtggcaggcgatgggcgtaatgaactatgaaatggaatctgcaaccctgctgaccatgtgtgcaagtcagggcctgcgtgccggtatggtagcgggtgttatcgttaaccgcacccagcaagagatcccgaatgctgagacgatgaaacaaaccgaaagccatgcggtgaaaatcgtggtggaagcggcgcgtcgtctgctgtaattctcttctcctgtctgaaggccgacgcgttcggccttttgtatttttgcgtagcgcctcgcaggaaatgcctttccaactggacgtttgtacagcacaattctattttgtgcgggtaagttgttgcgtcaggaggcgttgtggatttcagtatcatggtttacgcagttattgcgttggtgggtgtggcaattggctggctgtttgccagttatcaacatgcgcagcaaaaagccgagcaattagctgaacgtgaagagatggtcgcggagttaagcgcggcaaaacaacaaattacccaaagcgagcactggcgtgcagagtgcgagttactcaataacgaagtgcgcagcctgcaaagtattaacacctctctggaggccgatctgcgtgaagtaaccacgcggatggaagccgcacagcaacatgctgacgataaaattcgccagatgattaacagcgagcagcgcctcagtgagcagtttgaaaacctcgccaaccgtatttttgagcacagcaatcgccgggttgatgagcaaaaccgtcagagtctgaacagcctgttgagcccgctacgtgaacaactggacggtttccgccgtcaggttcaggacagcttcggtaaagaagcacaagaacgccataccctgacccacgaaattcgcaatctccagcaactcaacgcgcaaatggcccaggaagcgatcaacctgacgcgcgcgctgaaaggcgacaataaaacccagggcaactggggcgaggtagtattgacgcgggtgttggaggcttccggtctgcgtgaagggtatgaatatgaaacccaggtcagcatcgaaaatgacgcccgcagccggatgcagccggatgtcatcgtgcgcctgccgcagggaaaagatgtggtgatcgacgccaaaatgacgctggtcgcctatgaacgctattttaacgccgaagacgactacacccgcgaaagcgcgctacaggaacatatcgcgagcgtgcgtaaccatatccgtttgctgggacgcaaagattatcaacagctgccggggctgcgaactctggattacgtgctgatgtttattcccgttgaacccgcttttttactggcgcttgaccgccagccggagctgatcaccgaagcgttgaaaaacaacatcatgctggttagcccgactacgctgctggtggcgctgcgcactatcgccaacctgtggcgttatgagcatcaaagccgcaacgcccagcaaatcgccgatcgtgccagcaagctgtacgacaagatgcgtttgttcatcgatgacatgtccgcgattggtcaaagtctcgacaaagcgcaggataattatcggcaggcaatgaaaaaactctctagtgggcgcggaaatgtgctggcgcaggcagaagcgtttcgcggtttaggagtagaaattaaacgcgagattaatccggatttggctgaacaggcggtgagccaggatgaagagtatcgacttcggagcgttccggagcagccgaatgatgaagcttatcaacgcgatgatgaatataatcagcagagccgctaacccattgggagtagttaagccgggtagaaatctagggcatcgacgcccaatctgttacacttctggaacaattttttgatgagcaggcattgagatggtggataagagtcaagaaacgacgcactttggttttcagaccgtcgcgaaggaacaaaaagcggatatggtcgcccacgttttccattccgtggcaagtaaatacgatgtcatgaatgatttgatgagttttggtattcatcgtttgtggaagcgattcacgattgattgcagcggcgtacgccgtgggcagaccgtgctggatctggctggtggcaccggcgacctgacagcgaaattctcccgcctggtcggagaaactggcaaagtggtccttgctgatatcaatgaatccatgctcaaaatgggccgcgagaagctgcgtaatatcggtgtgattggcaacgttgagtatgttcaggcgaacgctgaggcgctgccgttcccggataacacctttgattgcatcaccattagctttggtctgcgtaacgtcaccgacaaagataaagcactgcgtagtatgtatcgcgtgctgaaacccggcggccgcctgctggtgcttgagttcagcaagccaattatcgagccgctgagcaaagcctatgatgcatactccttccatgtgctgccgcgtattggcagtctggtcgcgaacgacgccgacagctaccgttatctggcagaatccatccgtatgcatcccgatcaggataccctgaaagccatgatgcaggatgccggattcgaaagtgtcgactactacaatctgacggcaggggttgtggcgctgcatcgtggttataagttctgacaggagaccggaaatgccttttaaacctttagtgacggcaggaattgaaagtctgctcaacaccttcctgtatcgcagtcccgcgctgaaaacggcccgcagccgtctgctgggtaaagtattgcgcgtggaggtaaaaggctttagcacgagtttgattctggtgttcagcgaacgccaggttgatgtactgggcgaatgggcaggcgatgctgactgcaccgttatcgcctacgccagtgtgttgccgaaacttcgcgatcgccagcagcttaccgcactgattcgcagtggtgagctggaagtgcagggcgatattcaggtggtgcaaaacttcgttgcgctggcagatctggcagagttcgaccctgcggaactgctggccccttataccggtgatatcgccgctgaaggaatcagcaaagccatgcgcggaggcgcaaagttcctgcatcacggcattaagcgccagcaacgttatgtggcggaagccattactgaagagtggcgtatggcacccggtccgcttgaagtggcctggtttgcggaagagacggctgccgtcgagcgtgctgttgatgccctgaccaaacggctggaaaaactggaggctaaatgacgccaggtgaagtacggcgcctatatttcatcattcgcacttttttaagctacggacttgatgaactgatccccaaaatgcgtatcaccctgccgctacggctatggcgatacagtttattctggatgccaaatcggcataaagacaaacttttaggtgagcgactacgactggccctgcaagaactggggccggtttggatcaagttcgggcaaatgttaagtacccgccgcgatctttttccaccgcatattgccgatcagctggcgttattgcaggacaaagttgctccgtttgatggcaagctggcgaagcagcagattgaagctgcaatgggcggcttgccggtagaagcgtggtttgacgattttgaaatcaagccgctggcttctgcttctatcgcccaggttcataccgcgcgattgaaaagcaatggtaaagaggtggtgattaaagtcatccgcccggatattttgccggttattaaagcggatctgaaacttatctaccgtctggctcgctgggtgccgcgtttgctgccggatggtcgccgtctgcgcccaaccgaagtggtgcgcgagtacgaaaagacattgattgatgaactgaatttgctgcgggaatctgccaacgccattcagcttcggcgcaattttgaagacagcccgatgctctacatcccggaagtttaccctgactattgtagtgaagggatgatggtgatggagcgcatttacggcattccggtgtctgatgttgcggcgctggagaaaaacggcactaacatgaaattgctggcggaacgcggcgtgcaggtgttcttcactcaggtctttcgcgacagctttttccatgccgatatgcaccctggcaacatcttcgtaagctatgaacacccggaaaacccgaaatatatcggcattgattgcgggattgttggcagcctaaacaaagaagataaacgctatctggcagaaaactttatcgccttctttaatcgcgactatcgcaaagtggcagagctacacgtcgattctggctgggtgccaccagataccaacgttgaagagttcgaatttgccattcgtacggtctgtgaacctatctttgagaaaccgctggccgaaattagctttggacatgtactgttaaatctgtttaatacggcgcgtcgcttcaatatggaagtgcagccgcaactggtgttactccagaaaaccctgctctacgtcgaaggggtaggacgccagctttatccgcaactcgatttatggaaaacggcgaagcctttcctggagagctggattaaagatcaggtcggtattcctgcgctggtgagagcatttaaagaaaaagcgccgttctgggtcgaaaaaatgccagaactgcctgaattggtttacgacagtttgcgccagggcaagtatttacagcacagtgttgataagattgcccgcgagcttcagagtaatcatgtacgtcagggacaaagccgttattttctcggaattggcgctacgttagtattaagtggcacattcttgttggtcagccgacctgaatgggggctgatgcccggctggttaatggcaggtggtctgatcgcctggtttgtcggttggcgcaaaacacgctgattttttcatcgctcaaggcgggccgtgtaacgtataatgcggctttgtttaatcatcatctaccacagaggaacatgtatgggtggtatcagtatttggcagttattgattattgccgtcatcgttgtactgctttttggcaccaaaaagctcggctccatcggttccgatcttggtgcgagcatcaaaggctttaaaaaagcaatgagcgatgatgaaccaaagcaggataaaaccagtcaggatgctgattttactgcgaaaactatcgccgataagcaggcggatacgaatcaggaacaggctaaaacagaagacgcgaagcgccacgataaagagcaggtgtaatccgtgtttgatatcggttttagcgaactgctattggtgttcatcatcggcctcgtcgttctggggccgcaacgactgcctgtggcggtaaaaacggtagcgggctggattcgcgcgttgcgtagtctggcgacaacggtgcagaacgaactgacccaggagttaaaactccaggagtttcaggacagtctgaaaaaggttgaaaaggcgagcctcactaacctgacgcccgaactgaaagcgagcatggatgaactacgccaggccgcggagagcatgaagcgttcctacgttgcaaacgatcctgaaaaggcgagcgatgaagcgcacaccatccataacccggtggtgaaagataatgaagctgcgcatgagggcgtaacgcctgccgctgcacaaacgcaggccagtagcccggaacagaagccagaaaccacgccagagccggtggtaaaacctgctgcggacgctgaaccgaaaaccgctgcaccttcccctagcagcagtgataaaccgtaaacatgtctgtagaagatactcaaccgcttatcacgcatctgattgagctgcgtaagcgtctgctgaactgcattatcgcggtgatcgtgatattcctgtgtctggtctatttcgccaatgacatctatcacctggtatccgcgccattgatcaagcagttgccgcaaggtagtacgatgatcgccaccgacgtggccagcccgttctttacgccgatcaagctgacctttatggtgagcctgattctgagtgcgccggtgattctctatcaggtgtgggcatttatcgccccagcgctgtataagcatgaacgtcgcctggtggtgccgctgctggtttccagctctctgctgttttatatcggcatggcattcgcctactttgtggtctttccgctggcatttggcttccttgccaataccgcgccggaaggggtgcaggtatccaccgacatcgccagctatttaagcttcgttatggcgctgtttatggcgtttggtgtctcctttgaagtgccggtagcaattgtgctgctgtgctggatggggattaccagcccagaagacttacgcaaaaaacgcccgtatgtgctggttggtgcattcgttgtcgggatgttgctgacgccgccggatgtcttcagccaaacgctgttggcgatcccgatgtactgtctgtttgaaatcggtgtcttcttcagtcgcttttacgttggtaaagggcgaaatcgggaagaggaaaacgacgctgaagcagaaagcgaaaaaactgaagaataaattcaaccgcccgtcagggcggttgtcatatggagtacaggatgtttgatatcggcgttaatttgaccagtagccaatttgcgaaagaccgtgatgatgttgtagcgtgcgcttttgacgcgggagttaatgggctactcatcaccggcactaacctgcgtgaaagccagcaggcgcaaaagctggcgcgtcagtatagctcctgttggagtacggcgggcgtacatcctcacgacagcagccagtggcaagctgcgactgaagaagcgattattgagctggccgcgcagccagaagtggtggcgattggtgaatgtggtctcgactttaaccgcaactttagcacgccggaagagcaggaacgcgcttttgttgcccagctacgcattgccgcagatttaaacatgccggtatttatgcactgtcgcgatgcccacgagcggtttatgacattgctggagccgtggctggataaactgcctggtgcggttcttcattgctttaccggcacacgcgaagagatgcaggcgtgcgtggcgcatggaatttatatcggcattaccggttgggtttgcgatgaacgacgcggactggagctgcgggaacttttgccgttgattccggcggaaaaattactgatcgaaactgatgcgccgtatctgctccctcgcgatctcacgccaaagccaagttcccggcgcaacgagccagcccatctgccccatattttgcaacgtattgcgcactggcgtggagaagatgccgcatggctggctgccaccacggatgctaatgtcaaaacactgtttgggattgcgttttaaagtttgcggaactcggtattcttcacactgtgcttaatctctttattaataagattaagcaatagcatggagcgagcctcaccatcgggttcggtgaaaatggcctgaaagccttcgaacgcgccttcggtaataatcaccttatcacccggataaggggttgccggatcgacaatgtctttcggtttatatacgcttagctgatgaataaccgcgcttgggactatcgctgggctcgcgccaaagcgcacgaagtggctgacaccgcgggtcgcgttgatagtcgtggtatgaatcacttctgggtcaaattccacaaacaggtagttggggaacaatggctcactgactgcagtacgttttccacgcacgattttttccagggtgatcatcggtgccaggcaattcacagcctgtctttcgaggtgttcctgggcacgttgaagttgcccgcgcttgcagtacagtaaataccaggattgcataatgactcttatccgtttaatcggggcgcaaggatagcaaaagctttacgctaagttaattatattccccggtttgcgttataccgtcagagttcacgctaatttaacaaatttacagcatcgcaaagatgaacgccgtataatgggcgcagattaagaggctacaatggacgccatgaaatataacgatttacgcgacttcttgacgctgcttgaacagcagggtgagctaaaacgtatcacgctcccggtggatccgcatctggaaatcactgaaattgctgaccgcactttgcgtgccggtgggcctgcgctgttgttcgaaaaccctaaaggctacagtatgccggtgctgtgcaacctgttcggtacgccaaagcgcgtggcgatgggcatggggcaggaagatgttagcgcgctgcgtgaagttggtaaattattggcgtttctgaaagagccggagccgccaaaaggtttccgcgacctgtttgataaactgccgcagtttaagcaagtattgaacatgccgacaaagcggctgcgtggtgcgccctgccaacaaaaaatcgtctctggcgatgacgtcgatctcaatcgcattcccattatgacctgctggccggaagatgccgcgccgctgattacctgggggctgacagtgacgcgcggcccacataaagagcggcagaatctgggcatttatcgccagcagctgattggtaaaaacaaactgattatgcgctggctgagccatcgcggcggcgcgctggattatcaggagtggtgtgcggcgcatccgggcgaacgtttcccggtttctgtggcgctgggtgccgatcccgccacgattctcggtgcagtcactcccgttccggatacgcttagtgagtatgcgtttgccggattgctacgtggcaccaagaccgaagtggtgaagtgtatctccaatgatcttgaagtgcccgccagtgcggagattgtgctggaagggtatatcgaacaaggcgaaactgcgccggaagggccgtatggcgaccacaccggttactataatgaagtcgatagtttcccggtatttaccgtgacgcatattacccagcgtgaagatgcgatttaccattccacctataccgggcgtccgccagatgagcccgcggtgctgggtgtcgcactgaacgaagtgtttgtgccgattctgcaaaaacagttcccggaaattgtcgatttttacctgccgccggaaggctgctcttatcgcctggcggtagtgacaatcaaaaaacagtacgccggacacgcgaagcgcgtcatgatgggcgtctggagcttcttacgccagtttatgtacactaaatttgtgatcgtttgcgatgatgacgttaacgcacgcgactggaacgatgtgatttgggcgattaccacccgtatggacccggcgcgggatactgttctggtagaaaatacgcctattgattatctggattttgccagccctgtctccgggctgggtagtaaaatggggctggatgccacgaataaatggccgggggaaacccagcgtgaatggggacgtcccatcaaaaaagatccagatgttgtcgcgcatattgacgccatctgggatgaactggctatttttaacaacggtaaaagcgcctgatgcgcgtttgttttgccctatttatcgatccgacagagaaagcgcatgacaaccttaagctgtaaagtgaccagcgtagaagctatcacggataccgtatatcgtgtccgcatcgtgccagacgcggccttttcttttcgtgctggtcagtatttgatggtagtgatggatgagcgcgacaaacgtccgttcagtatggctagcacgccggatgaaaaagggtttatcgagctgcatattggcgcttctgaaatcaacctttacgcgaaagcagtcatggaccgcatcctcaaagatcatcaaatcgtggtcgacattccccacggagaagcgtggctgcgcgatgatgaagagcgtccgatgattttgattgcgggcggcaccgggttctcttatgcccgcagcattttgctgacagcgttggcgcgtaacccaaaccgtgatatcaccatttactggggcgggcgtgaagagcagcatctgtatgatctctgcgagcttgaggcgcttagcttgaagcatcctggtctgcaagtggtgccggtggttgaacaaccggaagcgggctggcgtgggcgtactggcaccgtgttaacggcggtattgcaggatcacggtacgctggcagagcatgatatctatattgccggacgttttgagatggcgaaaattgcccgcgatctgttttgcagtgagcgtaatgcgcgggaagatcgcctgtttggcgatgcgtttgcatttatctgagatataaaaaaacccgcccctgacaggcgggaagaacggcaactaaactgttattcagtggcatttagatctatgacgtatctggcaaaccatgcccgatgcgacgctgtcgcgtcttatcgtgcctacaaatagtccgaaccgtaggccggataaggcgtttacgccgcatccggcaattggtgcatgatgcctgatgcgacgctgtcgcgtcttatcgtgcctacaaatagtccgaaccgtaggccggataaggcgtttacgccgcatccggcaattggtgcatgatgcctgatgcgacgctggcgcgtcttatcaggcctacattggtgccggatcggtagaccggataaggcgttcacgccgcatccggcaagtggttaaacccgctcaaacaccgtcgcaataccctgacccagaccgatacacatcgtcgccagaccaaactgaacgtctttgcgttccatcagattcagcagcgtggtgctgatacgcgcaccggaacaacccagcggatgacccagcgcgatcgcgccaccgttgaggttgatcttctcgtcaatctgctcaattagtcccagatctttaatacatggcaggatctgcgcggcaaaggcttcgttcatttcaaacacgccgatatcgctggcagaaagccccgcttttttcagcgccagtttgctggccggaaccgggccgtaacccataatgcttgggtcacaaccaacgaccgccatgctacgcacacgagcgcgcggcttaagacctaattcatgggcgcggctttcactcatcaccagcatggcagctgcgccatcggaaagtgcagaagatgtgcccgccgttaccataccgtttactggatcaaacgccggacgcagcgtggcgagggcttccacggtggtttccgggcgaatcacttcgtcgtaattaaactgcttcaggacgccgtcggcatcgtgaccaccggtcgggatgatttcatttttaaatgcggcgctctgcgtggcggcccaggcgcgggcgtgactccgcgcggcaaaggcatcctgcatttcacggctgataccgtgcatacgcgccagcatttctgccgttaagcccatcatgcccgccgctttggcgacattgcggctcaggccggggtgaaaatcgacgccgtgactcatcggcacatggcccatatgctccacgccgccaaccagacatgcctgcgcatcgccagtcatgatcattcgtgctgcgtcatgcagtgcctgcatggaactaccacacaagcgattaacggtaaccgccgggacagagtgtggtacttctgccagcagcgccgcgttacgggcgatattaaaaccctgctccagcgtctgctgcacacaaccccagtaaatatcgtcgagggccgccgcttccagcgccgggttacgcgccagcaggctacgcattaaatgagcggagagatcttctgcacgcacgttacgaaaagcaccgcccttgctacggcccatcggggtgcgaattgcatcgacaatgacaacctgttccattgtgactccttaagccgttttcaggtcgccaaccggacgggctggctcaaccggaggatagtacggttcgttatgacgcgctttattacgcagaccttccggcacttcatacagcgggccgaggtgctgatattgctgtgccatatcgaggtattttgcgctaccgagggtgtccagccagcggaacgcgccgccgtggaacggagggaagcccaggccgtagaccagcgccatatccgcttccgccggagtggcgataatgccttcctccagacagcgcaccacttcgttgaccatcgggatcatcatgcgggcgataatctcttcttcgctgaagtcgcgcttcggctggctcacttctgccagcaggtcttcaacggcggcgtcttcttctttcttcggcttacctttgctgtcttctttataacgccagaaaccgaggccgttcttctgaccaaagcggttggcatcaaacagcgcgtcgatggcatcgcggtaatctttctgcatccgctgcgggaagcctgctgccatgacagcctgagcgtgatgcgcggtatcaatgcccacaacgtccagcagatatgccgggcccatcggccagccaaactgtttttccatcactttgtcgatcttgcggaaatccgcgccgtcgcgcagcagctggctgaaaccggcgaaatacgggaacagcacgcggttaacaaagaagccggggcagtcgttaaccacaatcggcgtcttgcccatcttgctcgcccaggcgacaactttcgcgatggtttcgtcggagcttttctcgccgcgaataatttctaccaacggcattcggtggaccgggttaaagaagtgcatcccgcagaagttttccgggcgttccagcgcgttggccagttcgctgataggaatggtactagtgttagacgccagcacggtatcctggcgtactttttgttcggtttctgccagtacggcttttttcactttcgggttttcaacaaccgcttctaccacaatatccacgcggtcaaatccggcgtagtcgagcgttgggtggattgtggagatcacgccagccagtttcagaccatcgatcttgccgcgctcaagctgcttgttcagcagtttcgcggcttcggtcatgccgagggttaagctcttgtcgttgatatctttcatgacaaccggcacgcctttccacgcagactggtaagcgatgccgccgcccataatgcctgcacccagcaccgcggcctgtttcggggtttcaacgtctttggtgagtttcttcgctttgccttttacatattgatcgttaaggaaaatgccgaccagtgcgcgggcttcgttggtatgcgccagcgggacaaaacttttgttttccaggtttaaggcttcttcacgaccaaaacgggccgcagcttcaatggtttttactgcggtgatgggggccggataatgtttccccgctgtttgtgcgaccatccctttagcgatggtgaagctcatggtggcttcaatcttgctcagttttagtggttccagcttcggctgacgttttgctttccagtcgaggtcgccgttaatggcctggcgtaaaaccgcctttgcgccttcaaccagtttttctgctttgactacgccatccaccagaccgattttcagcgcctgatccgcgccgacatctttaccggcggcaatgatttccagcgcactgtcagcgcccagcatacgtggcatacgtacagaaccgccaaagccaggcatgatgcccagtttggtttccggcagaccgatgcgcagatccggcgtcgccagacgataatcggtcgccagcacgcattcgcagccaccgcccagcgcatagccattgacggcagcaatggtcggcaccggcagatcttccaggcgattaaacacgctattggcaaagtgcagccactgacttaactgttcttcaggaacgaggaacagggacaaaaattcggtgatatcagcaccgacgataaaggctgctttgttgctacgcagcagcagcccttttagatcactttgctgttccagcacgccgatggcctcgccgaggctggcgacggtcgcagtgtcgagtttattaacactacctggggcatcaaataccagttcggcaatgccatcttccagccagtcaaggtacagggtgtcgcctttgtaaagcatgtcagtctcctgaatccgcaaggtgatctggtcgtaccagatgagtcgaagtgtgtattttgtgttaaaaatatgcaaacaaaagattaaagaaatgccgatctgatcacgctcggcagaaatcacgctctggatgaacgatgtgctaagatgcggagacttaaggtcaaaaaaacagaagggtaaaaaatggaaagtctggccagcctctataaaaatcatatagctaccttacaagaacggactcgcgatgcgctggcgcgcttcaagctggatgcgttacttattcactccggcgagctgttcaatgtttttctcgacgatcatccctatccgtttaaagtgaacccgcaattcaaagcgtgggtgccggtaactcaggtgccaaactgctggttgctggtggatggcgtgaacaagccgaaactgtggttctatctgccggttgattactggcacaacgtcgaaccgctgccgacctctttctggactgaagatgtggaagtgatcgcgctgccgaaagccgatggcattggtagcctgctgcctgctgcgcgcggcaatatcggttatatcggtccggtgccggaacgtgcgctgcaactgggtattgaggccagcaacatcaacccgaaaggggttatcgactacctgcattactatcgctccttcaaaactgagtacgaactggcctgtatgcgtgaagcgcagaaaatggcggtcaacggtcaccgcgcggcagaagaagcgttccgttctggcatgagcgagttcgatatcaacattgcctatctgaccgcgaccggtcatcgtgataccgacgtaccttacagcaacattgtggcgcttaacgaacacgctgcggtactgcattacaccaaactggaccatcaggcaccggaagagatgcgcagcttcctgctggatgccggggcagaatataacggctatgcggctgacctgacccgtacctggagcgcaaaaagtgacaacgactacgcgcagctggtgaaggacgttaatgatgaacaactggcgctgatcgccaccatgaaagcaggcgtcagctatgtggattaccacatccagttccatcagcgcatcgccaaactgctgcgtaaacatcaaatcatcaccgatatgagtgaagaagcgatggtcgaaaacgatcttaccgggccgtttatgccgcatggtatcggccatccgctgggcctgcaggtgcatgacgtcgctggttttatgcaggatgatagcggtacgcacctcgcggcaccggcaaaatatccgtacctgcgctgcacccgtattctccagccgggcatggtgttaaccatcgaaccgggtatctacttcatcgaaagcctactggcaccgtggcgtgaagggcagttcagcaagcacttcaactggcagaaaattgaagcactgaaaccgttcggcggcattcgtatcgaagacaacgtggtgatccacgaaaacaacgtggaaaacatgacccgggatctgaaactggcgtgatggaaagctggttaattcctgcggcaccggtcacggtcgttgaagagatcaaaaagagccgcttcataacgatgttggcgcataccgatggcgttgaggcggcgaaagcgtttgttgaaagcgtgcgggcagaacaccccgatgcccggcaccattgcgtggcgtgggtcgcgggtgcgccggatgattctcaacagctgggtttctctgacgacggggagccggcgggaacggcaggtaaaccgatgctcgcccagctaatgggcagcggcgtcggggaaattaccgctgtggtagtgcgctactacggcggcatattgcttggcaccggtgggttagtgaaagcgtatggcggcggcgtgaatcaggcgctgcgccagctaacgacccaacgcaagacgccattaaccgaatatactttgcaatgtgaatatcatcagttaaccggcattgaagcgttgctggggcagtgtgacggcaaaattatcaacagtgattatcaggcattcgttctgctgcgggtggcgcttccggcggcgaaagtggctgaattttccgcaaagctggcggattttagccgtggtagtttgcaattgttagcgattgaagaataatccccacttcgttttgcagaactaaggaagcggcagagatgcattttcgcgccattacccgaatcgttggactactggtcatcttatttagtgggaccatgattatccctgggctggtagcactcatctaccgggatggagcgggccgcgcttttacccagaccttttttgtcgccctcgccattggctctatgctgtggtggccgaaccgcaaagagaaaggcgaacttaaatcccgtgaggggtttctgatagtggtgctgttctggaccgtgctgggtagcgtcggtgcgctcccttttatcttcagcgaaagcccgaacctcacgattaccgatgcgttttttgaatctttctctggcctgaccactacgggagccactacgctggtggggctggatagcctccctcacgccatcctcttttatcgccagatgctgcaatggtttggcgggatggggatcatcgtgttggcggttgcgatactgcctatcctcggcgtgggtgggatgcagctctatcgcgcagaaatgcccggcccgctgaaagataacaaaatgcgcccgcgaattgcggaaacggcgaaaaccctgtggttgatttatgtcttgctgaccgtcgcctgtgcgctggcgttgtggtttgccggaatggatgcctttgatgccatcggccatagctttgcgactatcgctattggcggcttcagcacacatgatgccagtatcggttatttcgatagcccgactattaacactatcattgctatcttcctgctgatctccggctgtaactacggtctgcactttagtctgttaagtgggcgtagtctgaaggtttattggcgcgatccggaatttcgcatgtttatcggcgtacagtttacgctggtggttatttgtaccctcgtactgtggtttcataatgtctacagtagcgcgctgatgacaattaaccaggcgtttttccaggtggtgagcatggcgacaaccgccgggtttacaactgacagcattgcccgctggccgctctttttgccggtactgcttttatgtagtgcctttatcggcggttgcgccgggagtacgggcggtggcctgaaggtgatccgcatcctgctgctgtttaagcaggggaaccgtgagctgaaacgactggtgcatccgaacgccgtctatagcattaagctggggaatcgcgcactgccggaacgtatcctcgaagccgtttggggatttttctccgcctatgcattggtgtttattgtcagtatgctggcgattatcgccacgggcgtggatgacttttctgcctttgcgagcgttgttgcgacattgaataacctggggccagggcttggcgtggttgctgataactttaccagtatgaacccggtggctaaatggatcctgattgccaacatgctgtttggtcgtctcgaggtctttacattgctggtgctctttaccccgactttctggcgtgaatgatggagtaatacgtgaaaacattaattcttttcagtacaagggacggacaaacgcgcgagattgcctcctacctggctagcgaactgaaagaactggggatccaggcggatgtcgccaatgtgcaccgcattgaagaaccacagtgggaaaactatgaccgtgtggtcattggtgcttctattcgctatggtcactaccatagtgcgttccaggaatttgtcaaaaaacatgcgacgcggctgaatagcatgccgagcgccttttactccgtgaatctggtggcgcgcaaaccggagaagcgtactccacagaccaacagctacgcgcgcaagtttctgatgaacagccaatggcgtcccgatcgctgcgcggtcattgccggggcgctgcgttacccacgttatcgctggtacgaccgttttatgatcaagctgattatgaagatgagtggcggtgaaacggatacgcgcaaagaagttgtctataccgattgggagcaggtggcgaatttcgcccgagaaatcgcccatttaaccgacaaaccgacgctgaaataagcataaagaataaaaaatgcgcggtcagaaaattattttaaatttcctcttgtcaggccggaataactccctataatgcgccaccactgacacggaacaacggcaaacacgccgccgggtcagcggggttctcctgagaactccggcagagaaagcaaaaataaatgcttgactctgtagcgggaaggcgtattatgcacaccccgcgccgctgagaaaaagcgaagcggcactgctctttaacaatttatcagacaatctgtgtgggcactcgaagatacggattcttaacgtcgcaagacgaaaaatgaataccaagtctcaagagtgaacacgtaattcattacgaagtttaattctttgagcgtcaaacttttaaattgaagagtttgatcatggctcagattgaacgctggcggcaggcctaacacatgcaagtcgaacggtaacaggaagaagcttgcttctttgctgacgagtggcggacgggtgagtaatgtctgggaaactgcctgatggagggggataactactggaaacggtagctaataccgcataacgtcgcaagaccaaagaggggtaccttcgggcctcttgccatcggatgtgcccagatgggattagctagtaggtggggtaacggctcacctaggcgacgatccctagctggtctgagaggatgaccagccacactggaactgagacacggtccagactcctacgggaggcagcagtggggaatattgcacaatgggcgcaagcctgatgcagccatgccgcgtgtatgaagaaggccttcgggttgtaaagtactttcagcggggaggaagggagtaaagttaatacctttgctcattgacgttacccgcagaagaagcaccggctaactccgtgccagcagccgcggtaatacggagggtgcaagcgttaatcggaattactgggcgtaaagcgcacgcaggcggtttgttaagtcagatgtgaaatccccgggctcaacctgggaactgcatctgatactggcaagcttgagtctcgtagaggggggtagaattccaggtgtagcggtgaaatgcgtagagatctggaggaataccggtggcgaaggcggccccctggacgaagactgacgctcaggtgcgaaagcgtggggagcaaacaggattagataccctggtagtccacgccgtaaacgatgtcgacttggaggttgtgcccttgaggcgtggcttccggagctaacgcgttaagtcgaccgcctggggagtacggccgcaaggttaaaactcaaatgaattgacgggggcccgcacaagcggtggagcatgtggtttaattcgatgcaacgcgaagaaccttacctggtcttgacatccacggaagttttcagagatgagaatgtgccttcgggaaccgtgagacaggtgctgcatggctgtcgtcagctcgtgttgtgaaatgttgggttaagtcccgcaacgagcgcaacccttatcctttgttgccagcggtccggccgggaactcaaaggagactgccagtgataaactggaggaaggtggggatgacgtcaagtcatcatggcccttacgaccagggctacacacgtgctacaatggcgcatacaaagagaagcgacctcgcgagagcaagcggacctcataaagtgcgtcgtagtccggattggagtctgcaactcgactccatgaagtcggaatcgctagtaatcgtggatcagaatgccacggtgaatacgttcccgggccttgtacacaccgcccgtcacaccatgggagtgggttgcaaaagaagtaggtagcttaaccttcgggagggcgcttaccactttgtgattcatgactggggtgaagtcgtaacaaggtaaccgtaggggaacctgcggttggatcacctccttaccttaaagaagcgttctttgaagtgctcacacagattgtctgatgaaaatgagcagtaaaacctctacaggcttgtagctcaggtggttagagcgcacccctgataagggtgaggtcggtggttcaagtccactcaggcctaccaaatttgcacggcaaatttgaagaggttttaactacatgttatggggctatagctcagctgggagagcgcctgctttgcacgcaggaggtctgcggttcgatcccgcatagctccaccatctctgtagtgattaaataaaaaatacttcagagtgtacctgcaaaggttcactgcgaagttttgctctttaaaaatctggatcaagctgaaaattgaaacactgaacaacgaaagttgttcgtgagtctctcaaattttcgcaacacgatgatgaatcgaaagaaacatcttcgggttgtgaggttaagcgactaagcgtacacggtggatgccctggcagtcagaggcgatgaaggacgtgctaatctgcgataagcgtcggtaaggtgatatgaaccgttataaccggcgatttccgaatggggaaacccagtgtgtttcgacacactatcattaactgaatccataggttaatgaggcgaaccgggggaactgaaacatctaagtaccccgaggaaaagaaatcaaccgagattcccccagtagcggcgagcgaacggggagcagcccagagcctgaatcagtgtgtgtgttagtggaagcgtctggaaaggcgtgcgatacagggtgacagccccgtacacaaaaatgcacatgctgtgagctcgatgagtagggcgggacacgtggtatcctgtctgaatatggggggaccatcctccaaggctaaatactcctgactgaccgatagtgaaccagtaccgtgagggaaaggcgaaaagaaccccggcgaggggagtgaaaaagaacctgaaaccgtgtacgtacaagcagtgggagcacgcttaggcgtgtgactgcgtaccttttgtataatgggtcagcgacttatattctgtagcaaggttaaccgaataggggagccgaagggaaaccgagtcttaactgggcgttaagttgcagggtatagacccgaaacccggtgatctagccatgggcaggttgaaggttgggtaacactaactggaggaccgaaccgactaatgttgaaaaattagcggatgacttgtggctgggggtgaaaggccaatcaaaccgggagatagctggttctccccgaaagctatttaggtagcgcctcgtgaattcatctccgggggtagagcactgtttcggcaagggggtcatcccgacttaccaacccgatgcaaactgcgaataccggagaatgttatcacgggagacacacggcgggtgctaacgtccgtcgtgaagagggaaacaacccagaccgccagctaaggtcccaaagtcatggttaagtgggaaacgatgtgggaaggcccagacagccaggatgttggcttagaagcagccatcatttaaagaaagcgtaatagctcactggtcgagtcggcctgcgcggaagatgtaacggggctaaaccatgcaccgaagctgcggcagcgacactatgtgttgttgggtaggggagcgttctgtaagcctgtgaaggtgtgctgtgaggcatgctggaggtatcagaagtgcgaatgctgacataagtaacgataaagcgggtgaaaagcccgctcgccggaagaccaagggttcctgtccaacgttaatcggggcagggtgagtcgacccctaaggcgaggccgaaaggcgtagtcgatgggaaacaggttaatattcctgtacttggtgttactgcgaaggggggacggagaaggctatgttggccgggcgacggttgtcccggtttaagcgtgtaggctggttttccaggcaaatccggaaaatcaaggctgaggcgtgatgacgaggcactacggtgctgaagcaacaaatgccctgcttccaggaaaagcctctaagcatcaggtaacatcaaatcgtaccccaaaccgacacaggtggtcaggtagagaataccaaggcgcttgagagaactcgggtgaaggaactaggcaaaatggtgccgtaacttcgggagaaggcacgctgatatgtaggtgaagcgacttgctcgtggagctgaaatcagtcgaagataccagctggctgcaactgtttattaaaaacacagcactgtgcaaacacgaaagtggacgtatacggtgtgacgcctgcccggtgccggaaggttaattgatggggttagccgcaaggcgaagctcttgatcgaagccccggtaaacggcggccgtaactataacggtcctaaggtagcgaaattccttgtcgggtaagttccgacctgcacgaatggcgtaatgatggccaggctgtctccacccgagactcagtgaaattgaactcgctgtgaagatgcagtgtacccgcggcaagacggaaagaccccgtgaacctttactatagcttgacactgaacattgagccttgatgtgtaggataggtgggaggctttgaagtgtggacgccagtctgcatggagccgaccttgaaataccaccctttaatgtttgatgttctaacgttgacccgtaatccgggttgcggacagtgtctggtgggtagtttgactggggcggtctcctcctaaagagtaacggaggagcacgaaggttggctaatcctggtcggacatcaggaggttagtgcaatggcataagccagcttgactgcgagcgtgacggcgcgagcaggtgcgaaagcaggtcatagtgatccggtggttctgaatggaagggccatcgctcaacggataaaaggtactccggggataacaggctgataccgcccaagagttcatatcgacggcggtgtttggcacctcgatgtcggctcatcacatcctggggctgaagtaggtcccaagggtatggctgttcgccatttaaagtggtacgcgagctgggtttagaacgtcgtgagacagttcggtccctatctgccgtgggcgctggagaactgaggggggctgctcctagtacgagaggaccggagtggacgcatcactggtgttcgggttgtcatgccaatggcactgcccggtagctaaatgcggaagagataagtgctgaaagcatctaagcacgaaacttgccccgagatgagttctccctgactccttgagagtcctgaaggaacgttgaagacgacgacgttgataggccgggtgtgtaagcgcagcgatgcgttgagctaaccggtactaatgaaccgtgaggcttaaccttacaacgccgaaggtgttttggcggattgagagaagattttcagcctgatacagattaaatcagaacgcagaagcggtctgataaaacagaatttgcctggcggcagtagcgcggtggtcccacctgaccccatgccgaactcagaagtgaaacgccgtagcgccgatggtagtgtggggtctcctcatgcgagagtagggaactgccaggcatcaaataaaacgaaaggctcagtcggaagactgggcctttcgttttatctgttgtttgtcggtgaacgctctcctgagtaggacaaatccgccgggagcggatttgaacgttgcgaagcaacggcccggagggtggcgggcaggacgcccgccataaactgccaggcatcaaattaagcagaaggccatcctgacggatggcctttttgcattggcgcagaaaaaaatgccggatgcgacgctggcgcgtcttatccagcctactcttgcttatccgttctgcttttgcatccactccaccacaaaatcagccagcccctcaacatcattaatatccagtaatgcgacatcaagattaagcggcacatcactggctacagcaataacatgcctgtctatcactaattcttcaggtcgatgtccggctccatcgcgaaacagcacaatctttgcgatctcttcatgcttaaacccttcgaccagaatcaaatccagcttactggtatccattcgacttgcgagaaactgtagatccagctcttcttcgtctggtgtttccgtcatcaaggcccatcgttgctggctggcaacgatggtttgtaccgcgccagccttgcgcagctcatagctatctttgcctggcttatcaacatccatatcatggtgcgtatgcttaatcagccctggacggatccctctggcgcataatgccgggatcagttttttcaaaagcgtagtttttccggtaccactccacgcggcaaaggcgagtaacggtatcatcgtttttcctgccatcgggcaagctcctctggcgtattcacgttaacaaatgcatctttatgatcgctgaaatcaaccgcatgaccgccagccagacgcataaataccattacccggcgttctcctgcttgcagatattccagtaataaaggctcaatagcgcggtttaccagagcaatagtcgggtgatcgcgttcaccgtcatggacccacacgacaggcgcatctttgcgctgatgattaagcctggctgctaaatcagggggaatgtaaggcgtatcgcacgggcaaaacaaaaaccactcaccagcttcctgctgcattacactaagcattcctgccagagggcctgggtaatccgccagactatcttcaatcactttcagaccgcttgcctgatagatttcctgatgacgattagcattaaccacgacgtgagagagctgcgtcataagcgcgtcagcgacatgttgccataatggtttgccgtttaattcaagcaatcctttatctacgccgcccattcgtctggctttaccgcctgccagcacaacgcctgttatcgtcgtcatcagattcaccgatatcgcctcttttattgtgggattgaccctgctaacgtgtctgtctcaagagtaaggagcatcactatgaaatgtaaacgtctgaatgaagttattgaactcctccagccagcctggcaaaaagagccagaccttaacctgctgcaatttttgcagaaactggcgaaagagagtggttttgacggcgaactggcggatttgacggatgacattctgatctatcacctgaaaatgcgtgattccgcgaaagatgcggtgatcccgggtttgcagaaagattatgaagaagacttcaaaacggcgctgttacgcgctcgcggcgtaattaaagagtaaaagcttgtaagcggcgccaccaaaatcatcgtgaaatgatatccttcgtcattcgtaatgttttccggatgatgggatgaataacagcgcttttactttccagacactacacccggataccatcatggacgctctgtttgagcatgggatccgggtggattccggtcttaccccgcttaacagctatgaaaaccgtgtctatcaatttcaggacgaagatcgtcgacgttttgtcgtcaaattttatcgccctgaacgttggacagccgatcaaatcctcgaagaacatcaatttgcgttgcagctggtaaatgatgaagttccggtcgcagcacctgtggcctttaacggtcagactttattgaatcatcagggattttatttcgctgtttttccaagcgtcggtggtcgccagttcgaagctgataatatcgatcagatggaagcggttgggcgttatttagggcgtatgcaccagacggggcgcaaacagctttttatccatcgcccgaccatcggtttgaacgaatatctcattgagccacgcaagctgtttgaggacgctacactgataccttccgggttgaaagcggcattcctgaaagcgacagatgagctgattgccgccgttacagcacactggcgggaagatttcaccgttctgcggctacatggagactgccacgccgggaatattctctggcgcgatggtccaatgtttgttgatctggatgatgcacgtaatggtccagccgttcaggatttgtggatgttgctcaatggcgataaagccgagcagcggatgcaactggaaactattattgaagcttatgaagaatttagcgagttcgacaccgctgaaatcggactgattgaacctttacgcgccatgcgtttggtttattatcttgcctggctaatgcggcgttgggctgatcccgcgttcccgaaaaatttcccgtggttaaccggggaagattactggctgcgacagacggcgacttttatagaacaggcaaaagttctacaagaaccccctttgcaattaacacctatgtattaatcggagagagtagatcatgaaaaagatttggctggcgctggctggtttagttttagcgtttagcgcaagcgcggcgcagtatgaagatggtaaacagtacactaccctggaaaaaccggtagctggcgcgccgcaagtgctggagtttttctctttcttctgcccgcactgctatcagtttgaagaagttctgcatatttctgataatgtgaagaaaaaactgccggaaggcgtgaagatgactaaataccacgtcaacttcatgggtggtgacctgggcaaagatctgactcaggcatgggctgtggcgatggcgctgggcgtggaagacaaagtgactgttccgctgtttgaaggcgtacagaaaacccagaccattcgttctgcttctgatatccgcgatgtatttatcaacgcaggtattaaaggtgaagagtacgacgcggcgtggaacagcttcgtggtgaaatctctggtcgctcagcaggaaaaagctgcagctgacgtgcaattgcgtggcgttccggcgatgtttgttaacggtaaatatcagctgaatccgcagggtatggataccagcaatatggatgtttttgttcagcagtatgctgatacagtgaaatatctgtccgagaaaaaataattcaatgtaaattacataaagcccgtgaatattcacgggctttttttattatttaataaatataaatacattctgataatgcatcctgccgctggacattatttcagcataagtggatattcaaagttttgctgttttatcagggaatatttatatgatacgtaagagtgctacaggtgttattgttgcgttagccgtaatctggggtggtggcacatggtacacaggtacgcaaattcagcctggtgtcgaaaaatttattaaagattttaacgatgctaaaaagaaaggtgaacatgcctacgatatgacgttaagttatcaaaattttgacaaaggcttttttaattcccgttttcaaatgcaaatgacattcgataacggtgcacccgatctcaatatcaagccaggccagaaagttgtatttgatgtggatgttgagcacggtccgttgcccatcacaatgttaatgcatggtaatgtcatcccagcactggcagcggcaaaagtgaacttagtgaataatgaactgacacaaccgctatttatcgccgcgaaaaataaaagccccgtggaagcgacattgcgattcgcgtttggtggcagtttctctacgacattagatgttgcccctgcagagtatggaaagttttcttttggtgagggccagtttacttttaatggtgatggtagtagtttgtctaacctggatattgaaggcaaagtcgaagatattgttctgcaattaagtccaatgaacaaagtaacggcaaaaagttttaccattgattctctggcgcgattagaagaaaagaaatttccggttggtgaaagcgagagcaaatttaatcagattaacattatcaatcacggggaagacgttgcccaaatcgatgctttcgttgcaaaaaccaggctggatcgcgttaaagacaaagattatatcaatgtcaatctcacctacgaacttgataagttaacaaaagggaatcagcaactcggtagtggtgagtggagtttgattgctgaatctattgatcccagtgcagtgcgccaatttatcatccagtataacattgcgatgcagaagcagcttgctgcacaccctgagttagcaaacgatgaagttgctctgcaagaagtgaatgctgcattgttcaaagagtatttaccgttattacaaaaaagtgagccgaccattaaacaaccggtaagatggaagaacgcactcggcgaactaaatgccaatctggatatcagtattgccgacccagccaaatctagtagttccacaaacaaagatatcaaaagcctcaattttgatgtgaagttaccgcttaatgtcgtcacagaaaccgcaaaacagcttaatttatctgaaggaatggatgcggaaaaagcgcaaaagcaggctgataaacaaatcagcgggatgatgacattaggtcagatgtttcagttaatcacgattgacaacaataccgccagcctgcagctgcgttatacaccgggtaaagttgtttttaacggacaggagatgagcgaagaagaatttatgtctcgtgccggacgttttgttcattaaaatactcactcgcctctgctcattcagaggcgagtaaaacttacttattctgacgctgactactcatgagagacgtcagaagccggtctttttcctgccacaaactgttcagccattgctgaaaatggcgcttaaagcttttgtcattgatgtagtcgccatgtaactcatcggcaataggctgtaaatccacatgtacgacaatccgcgtcagtttaccgcttaacatatcgaagaacggctgacggttattgtccggataacacagcgtaacattaagcagtttatcgaattgtttacccagtacatttagcgccatcgcaatgcctgccgcctttggtggcaacaagttttgaaaagtggagtgggtttgctgatgtttttcttgcgtgaaacgggagccttcaacgaaattgacaatggtggtgggatgcaggcgaaacttttcacaagaacgccgagtggtttcaacatctttaccacgtcgctccggatgacgtaataaataagcgcgggaataacgcttcataaacggcatatccaggctccagcacgccaggccaagaaatggcacccaggccagctgttgcttgaggaaatatttattcatcggaatgtgcttacgaaacagcacgcacagtacgacaatatctgcccaactacggtggttacaaataagcagataccagttcttcttacttaacccttccagcccgtgaacttcccattgaaggtgtgggttcagatgcagtaataccgccagaccttcacaccagcaatacatcataaaatcacaaaaacggctaacctttcgccaaatgactggcacaggtagcaatagttttacaatcccggcaatgatgatcgggacggaacaaaaaatagtgaccaaaatggtcaatacgatactcagcaaaagggttatcgcagcgagtattctcgtcataatgaatttattcaaaaggttagccatagacagtgcgctaaagaagcgcaaggcgcagattttagcagaaaacgacccaaataacggatgatccttaaggagaaaaataattcatatctatccacattagaaaaaatcccattatctcaattattagggatggatttatttttaactgcatgaaaaacaaagacaaacatcatgctgtaaaaagcatgataataaattaaaagcgatgtaaataatttatgcacaaagttatccacatgacgatttgcgagcgatccagaagatctacaaaagattttcacgaaaagcggtgaaaaactcatgttttcatcctgtctgtggcatcctttacccataatctgataaacaggcacggacattatggttcagatcccccaaaatccacttatccttgtagatggtagttcttatctttatcgcgcatatcacgcgtttcccccgctgactaacagcgcaggcgagccgaccggtgcgatgtatggtgtcctcaacatgctgcgcagtctgatcatgcaatataaaccgacgcatgcagcggtggtctttgacgccaagggaaaaacctttcgtgatgaactgtttgaacattacaaaagtcatcgcccgccaatgccggacgatctgcgtgcacaaatcgaacccttgcacgcgatggttaaagcgatgggactgccgctgctggcggtttctggcgtagaagcggacgacgttatcggtactctggcgcgcgaagccgaaaaagccgggcgtccggtgctgatcagcactggcgataaagatatggcgcagctggtgacgccaaatattacgcttatcaataccatgacgaataccatcctcggaccggaagaggtggtgaataagtacggcgtgccgccagaactgatcatcgatttcctggcgctgatgggtgactcctctgataacattcctggcgtaccgggcgtcggtgaaaaaaccgcgcaggcattgctgcaaggtcttggcggactggatacgctgtatgccgagccagaaaaaattgctgggttgagcttccgtggcgcgaaaacaatggcagcgaagctcgagcaaaacaaagaagttgcttatctcagttaccagctggcgacgattaaaaccgacgttgaactggagctgacctgtgaacaactggaagtgcagcaaccggcagcggaagagttgttggggctgttcaaaaagtatgagttcaaacgctggactgctgatgtcgaagcgggcaaatggttacaggccaaaggggcaaaaccagccgcgaagccacaggaaaccagtgttgcagacgaagcaccagaagtgacggcaacggtgatttcttatgacaactacgtcaccatccttgatgaagaaacactgaaagcgtggattgcgaagctggaaaaagcgccggtatttgcatttgataccgaaaccgacagccttgataacatctctgctaacctggtcgggctttcttttgctatcgagccaggcgtagcggcatatattccggttgctcatgattatcttgatgcgcccgatcaaatctctcgcgagcgtgcactcgagttgctaaaaccgctgctggaagatgaaaaggcgctgaaggtcgggcaaaacctgaaatacgatcgcggtattctggcgaactacggcattgaactgcgtgggattgcgtttgataccatgctggagtcctacattctcaatagcgttgccgggcgtcacgatatggacagcctcgcggaacgttggttgaagcacaaaaccatcacttttgaagagattgctggtaaaggcaaaaatcaactgacctttaaccagattgccctcgaagaagccggacgttacgccgccgaagatgcagatgtcaccttgcagttgcatctgaaaatgtggccggatctgcaaaaacacaaagggccgttgaacgtcttcgagaatatcgaaatgccgctggtgccggtgcttagtcgcattgaacgtaacggtgtgaagatcgatccgaaagtgctgcacaatcattctgaagagctcacccttcgtctggctgagctggaaaagaaagcgcatgaaattgcaggtgaggaatttaacctttcttccaccaagcagttacaaaccattctctttgaaaaacagggcattaaaccgctgaagaaaacgccgggtggcgcgccgagtacgagcgaagaggtactggaagaactggcgctggactatccgttgccaaaagtgattctggagtatcgtggtctggcgaagctgaaaagcacctacaccgacaagctgccgctgatgatcaacccgaaaaccgggcgtgtgcatacctcttatcaccaggcagtaactgcaacgggacgtttaagcagtaccgatcctaacctgcaaaacattccggtgcgtaacgaagaaggtcgtcgtatccgccaggcgtttattgcgccagaggattatgtgattgtcagtgcggactacagccagattgaactgcgcattatggcgcatcttagccgtgacaaaggcttgctgaccgcattcgcggaaggaaaagatatccaccgggcaacggcggcagaagtgtttggtttgccactggaaaccgtcaccagcgagcaacgccgtagcgcgaaagcgatcaactttggtctgatttatggcatgagtgctttcggtctggcgcggcaattgaacattccacgtaaagaagcgcagaagtacatggacctttacttcgaacgctaccctggcgtgctggagtatatggaacgcacccgtgctcaggcgaaagagcagggctacgttgaaacgctggacggacgccgtctgtatctgccggatatcaaatccagcaatggtgctcgtcgtgcagcggctgaacgtgcagccattaacgcgccaatgcagggaaccgccgccgacattatcaaacgggcgatgattgccgttgatgcgtggttacaggctgagcaaccgcgtgtacgtatgatcatgcaggtacacgatgaactggtatttgaagttcataaagatgatgttgatgccgtcgcgaagcagattcatcaactgatggaaaactgtacccgtctggatgtgccgttgctggtggaagtggggagtggcgaaaactgggatcaggcgcactaagattcgcctgaacatgccttttttcgtaagtaagcaacataagctgtcacgttttgtgatggctattagaaattcctatgcaacaactgaaaaaaaattacaaaaagtgctttctgaactgaacaaaaaagagtaaagttagtcgcgtagggtacagaggtaagatgttctatctttcagaccttttacttcacgtaatcggatttggctgaatattttagccgccccagtcagtaatgactggggcgttttttattgggcgaaagaaaagatccgtaatgcctgatgcgctatgtttatcaggccaacggtagaattgtaatctattgaatttacgggccggatacgccacatccggcacaagcattaaggcaagaaaattattcgccgtcctgcgtttcttctacaggctgcatctcgctaaaccaggtatccagtttctgccgcagcttgtccacgccttgtttcttcaagctagaaaacgtttcaacctgcacatcaccgttaaacgccagtacagcttcacgcaccatattcaattgcgctttacgtgcgccgcttgccagtttgtccgctttggtcagcagcaccagaacggcgatattgctgtctaccgcccactcaatcatctgctgatccaaatctttcagcggatggcgaatatccattagcaccaccagaccttgcaggctctgacgtttttcgaggtattcgccgagcgcacgctgccatttgcgcttcatctcttccgggacttccgcataaccgtacccaggcaagtcaaccagacgcttgccgtcagccacttcaaacaggttgataagctgggtgcgccctggggttttactggtacgagccaggcttttctggttagtcagcgtgttcagcgcgctggatttacctgcgttggaacggcctgcaaaagccacttcaattccggtatcggaaggtaggtggcgaatatcaggcgcactcatcacaaaatgcgtctgttgataattcaaattagtcaaagcggtcgtctccgtcagtcaaagctttgtggcgattatacctgaaccataataaaaggcggatttttcggcgtgagcgttgtaagtaaaagccatacgctttgtgagacattgccgatagtctttatgcgaaatagcagagaaaattctgcgatgcatgtcaaataagctatataaatcagtgaattgcttttatataaaactctgaaaatgtgcaaatactgatggcggttgattgtttgtttaaagcaaaggcgtaaagtagcacccatagagcgaggacgctaacaggaacaatgactcaggatgagggtcaggagcgccaggaggcgaagacagaggattgtcaggaagacaaacgtccggagacgtaattaaacggaaatggaatcaacacggattgttccggctaaaggaaaaacagggtgtgttggcggcctgcaaggattgtaagacccgttaagggttatgagtcaggaaaaaaggcgacagagtaatctgtcgccttttttctttgcttgctttctgttagattccgccgcaaatctatactgaataaaacggctaaaagacgaaccattatgaaaccaagttctagtaacagtcgcagcaaaggtcatgcaaaagcgcgtcgaaaaacacgcgaggagctggatcaggaagctcgtgatcgcaagcgtcagaaaaaacgtcgtggtcatgcgccgggcagccgcgcagcgggcggaaacaccacgagtggcagcaaaggccagaacgcaccaaaagatccacgtattggcagtaaaacccctattccattgggcgtgactgaaaaagtcaccaaacagcacaaaccgaagagtgagaaacctatgcttagtccgcaggcggagttggaattactggaaacggatgagcgtctggatgcgctgctggaacgtctggaagcaggcgaaaccctgagtgccgaagagcaatcctgggtggatgctaaactggatcgtattgatgagttgatgcagaaactcggcctctcttatgacgatgacgaagaagaggaagaagacgagaagcaagaagacatgatgcgtctgctgcggggcaactaacggattgccgccgtgggccttcccgttctgctgataacccttccggttatatgttatctggtgtggttattcgttaaactacagcggttgtcgcggcgacaaaagtggctgcgcaaccggctgatgacccgaaacgggcatccgccggtacgccgtagccgccagagacgccatcggaaggagtgagcatgtctgtacagcaaatcgactgggatctggccctgatccagaaatataactattccgggccacgatacaccagctacccgaccgcgctggagtttagtgaagacttcggcgaacaggcgtttttacaagccgtggcgcgctatcctgagcgtccattatctctctacgtacatatcccgttctgccataagctttgttacttctgcggttgcaataagattgttactcgccagcagcacaaggccgatcagtatctggacgcgctggagcaagaaatcgtccatcgtgcaccgctgttcgccgggcgtcacgtcagccaattgcactggggcggcggaacgccgacgtatctgaataaagcgcaaatcagccgcctgatgaagctgctgcgcgaaaacttccagttcaatgccgatgcggagattagcatcgaagtcgatccgcgggaaatcgaactggatgtactcgatcatttacgcgccgaaggctttaatcgcctgagcatgggcgtgcaggacttcaacaaagaagtgcaacgtctggttaaccgcgagcaggatgaagagttcatctttgcactgcttaaccatgcgcgtgagattggttttacctccaccaacatcgacctgatttacggcctgccgaaacagacgccggagagtttcgcctttaccctgaaacgtgtggcggagctgaaccccgatcgtctgagtgtctttaactacgcgcatctgccgaccatttttgctgctcagcgcaaaatcaaagatgctgacctgccgagtccgcagcaaaaactcgatatcctgcaggaaaccatcgccttcctgacgcaaagcggctatcagtttatcggtatggatcactttgcccgtccggatgacgagctggcggtggcccagcgtgaaggcgtgctgcatcgtaacttccagggctacaccactcagggcgataccgatctgctggggatgggcgtttccgccatcagcatgattggcgactgctacgcgcagaaccagaaagagttgaagcagtactatcagcaagtggatgaacaaggcaatgcgctgtggcgtggtattgcgctaacgcgtgatgactgtattcgccgcgatgtgattaagagcctcatctgcaacttccgtctggattacgcccctattgagaaacagtgggatttgcacttcgctgattactttgcggaagatctcaagctgctcgccccgttagcaaaagatgggctggtggatgtggatgagaagggaatacaggtgacggcgaaaggtcgcttgctgatccgcaacatttgcatgtgctttgatacctatctgcgccagaaagcgcggatgcagcagttctctcgggtgatttaaatagtgaatggcgcttcgtttacaaagtagaaaacgaaagcgccatcaatgtgctgagaacaagattgcctgatgcgctgggcaacaaaacctgttgaaattattgcttttgtaggccggataaggcgtttacgccgcatcaggcatctgagcatgatgcctgatgcggcgctggtcgcgtcttatcaggcctacgactttctccgcatccggcataaacaacgagcttcagctaaacagcccaatcattgcggcacacagcacggcagcaacggcagtttgcggtgtgtggctgtcaactgcgccactcgataccagattaattattgattccagcataatgactctccccgttttccgggcaagatcatactgaacttatcggaacagtaaagcgtaaaataccagcaatttgcgctcaataatcaatctttacacacaagctgtgaatcactccatccccagctcttttaacttacgcgtcagggtgttgcggccccagccgagtagccgcgccgcttcctgtttatgcccctgcgtatgtcgcaacgcggtcgtcagtaacgtccgctccagctctggctgcgcttcggaaagcagattttgatgaccggaacgcagcgctctgtctgcccactgcgcaagaagcgtcgcccagctgtccggttgcatttggctagtactctccgcaaccgtactttcaaacagttcgccgggcaaatcctgaatcaacacttcctgcccggcggccatcaccgttagccagcggcaggtgttttccagctggcgcacgttgcctggccacgccagacgcgtcagagcagcttcggtttccggatgcagtaacttcgcttctacgcccagttcgcgcgcggcaacctgtaaaaaatggcgcgccagacggggaatatcttcccgacgttcgcgcagcggcggcagatgaacgcggataacgttcaggcggtggaacagatcctcacggaacttaccttcctgcactcgctgttcgagattctggtgagtggcagcgataatccgcacatccactttcaccggcgcatagccgccaacgcggtaaaactgaccgtctgccagcacgcgcagcaaacgcgtctgcacatccagcggcatatcaccaatttcgtcgaggaataatgtaccgccatcggcctgttcaaaacgcccctgacgaatggtattcgcgccagtaaacgcgcctttctcgtggccaaacagttcactttcgatcaaatcttttgggatagctgccatattcagcgcgataaacggcgctttggcgcgcggactgtggcgatgcagggcatgagcgaccagttctttaccggtgccggattcgccgttaatcagcacgctaatagaagaacggctaagccgaccgataatacggaacacgtcctgcatggctggcgcttcgccgatgatatcggtcgttgggccgttaagctgaacattacgcggctgctgctgttcctggtaatgactgatagcgcgctcaaccagcgccactgcttcgtcgatatcaaacggtttgggcagataatcaaacgccccttgttgataggcgctgacggcagcatccagatcggaatgtgcggtcataatgatgaccggaagcattggatggcgctgtttaatctgcttgagcagcgccagcccgtccattcccggcatacggatatcactaagcagcacatccggcgttttgctcgccagcgcctccagcacttctgcgccgttctcaaacgtcgtacaggttaaacctgccccagcgagcgcacgttcaagcacccaacggatggaactatcgtcatcgactacccagactatccctcgttgcataaacgtcacctttatttcctgataggcaggtaaacgctgaactcggtatgccctggccaactggtaaattcaattttgccactatgctgatcaatcaaattacgagcgatggataagccaagcccggtgccaccttcgcggccgctgaccatcgggtaaaacagcgtatcctgcaaatgaggcggaatgcccggcccgttatcttccacatcaatccgcgccgccagccggtagcgctcgccgtgtaaggtcagttgaaacgcggtgcgggtacgcagaatgatttcaccgccttccggccccagcgcctgtagcgcattgcgcacaatattcagcaagacctgttcaatttgatccgggtcgtgcgccagttccggtaggctgggatcgtaatcacgaatcaaccgcacgttgtccggcagttccatgctcaccagcgttaccacgcgttcagccactttgtgaatactttcggtaacgcgcgtaccgggcagctgcggccccaacagacggtcgaccagatttcgcagccggtccgcctgttcgataatcactttggtatattcgagtagacttgggtcaggtaacgctttgctgagcagctgcgccgcgccacgtaaaccgccaagcggatttttaatctcatgtgccaggccgcgcactaaatcacgggcagcaacctgctgggcgtgctgtagctgttcctgacttaagcggcgctggttatccatcggagccatctccagcaggatcatgccgtccggcatacgctgggccgtcacagaaaggatatggctgcgcccgtcgatgaccagcgtcacttcgttatcggtaaaaccttgccccgcctccagactttcttgcatcagctcgatatttaaactgaagtagctcaacagttccggtaacggtgtaccaaacaatttgcgggagctttgggcgagcagttgttgcgcggcagggttggcgtaatggatcgccaggttgtcatcgattaacaaaatactgttaatcaggctgttgaggatctgcccagcatcgggctgcgtgcctgttgccataaagcagtctcctgaacaggttgcaccattttagtgcattatagctttttacggataaaaagcgcgaagcatcagagaattgacggagaaaaaagcccatgcagagatgggctacagatagctgacaaacttcacgttggagagcgactcacctgctccggcctaccacatcatcaccgtgtaggccggataagacgcatttgcgtcgcatccggcgtgatgtgcttgccaccgatcccaggcctgccagagacaggcgaaaagtttccacggcaactaaaacacttagacgctgtagtacagctcaaactctaccggatgcggagtcatacgcacgcggtcatcttcttcgcgacgcagagcgatgtacgcatcaattgcttcgtcagtgaacacgccaccggctttcaggaactcgcggtccagatccagttcgttcagtgcttcttccagagagcctgcaacctgtgggatctctttcgcttcttctggcggcaggtcatacaggtttttgtccatggcttcgcccggatggatcttgttcttgataccatcaagaccggccatcagcagggcagcaaagcacaggtacgggttagctgccggatccgggaaacgtacttcgatacgacgtgctttcggagaagaaaccaccggaatacggatagacgcagaacggttacgcgcagagtaagccagcattaccggtgcttcatagcccgggaccagacgcttataagagttggtggtcgggtttgccagggcgttaatcgctttagcgtgtttgattacgccgccaatgtagtacagcgcctgctcagacagacctgcgtatttgtcgcctgcgaacaggttaacgccgtttttagacagagacatgtggcagtgcataccggagccgttatcaccgaacatcggttttggcataaaggtcgcggttttaccgaagcggtgcgctacgttgtgcacaacatatttgtagatctgaatttcgtcagcttttttggtcatggtattgaagcgggtagccacttcgttctgaccagcagtcgctacttcgtggtgatgggcttcaaccaccagacccatctgttccatcaccagacacatttcagaacgaatatcctgagcgctgtctaccggtggaaccgggaagtaaccgcctttcactgccggacggtgacctttgttaccaccttcgtattgggtggaggagttccatgcgccttcgatatcgtcgatagcaacgtgggaaccggagatagaacttccgaaacggatgtcatcgaacaggaagaattcaggttctggcccgaacagtacggtgtcggcaatgccagtggaacgcaggtaatcttcggcgcgcttcgcaatggagcgcgggtcacggtcatagccttgcagggtgccaggttcaaggatgtcgcaacggataatcagggtggagtcggcgaagaacgggtcaatcactgcggtggatgcgtctggcatcagcaccatgtcggactcgttaatgcctttccagccgccaatgctggagccgtcaaacattttgccttcttcgaagaattcagcattcacctgatgagcagggatagtgacgtgctgttctttacctttagtatcggtgaagcgcaaatcaacaaacttcacttcgtgctcgttcagcatcgtcagtacgtgttcagcggacatactttaactctcctggattggtcatggtcgtcgtggtaacgaaatctgcaattattttggccgtgtcgccgtaaaaaagataaagcgaaatctgtgccaacttttaaattgcccctaaaaggcgttatcatgcgcaccatcgtgcaaaagggctgcaccacgatgtgaatgttgcaccaatatagtgcttcaatggaaacattaagcaccatgttggtgcaatgacctttggataaccctttttatgctccgtgaaagcgatcacaaagggactctgcaatacttgtttgcggaggatgtttgtgatcctgttttgtagtgcgattaatccgtgtacaataacgcgctatttctaatgcctgaggcaaagttgtgatcgaaaaattgcgtaatatcgccatcatcgcgcacgtagaccatggtaaaaccaccctggtagacaagctgctccaacaatccggtacgttcgactctcgtgccgaaacccaagagcgcgtgatggactccaacgatttggagaaagagcgtgggattaccatcctcgcgaaaaacaccgctatcaaatggaatgattaccgtatcaacatcgttgataccccggggcacgccgacttcggtggtgaagttgaacgtgtaatgtccatggtagacagtgtgctgctggtggttgacgcatttgacggcccgatgccgcaaacgcgcttcgtaaccaaaaaagcgtttgcttacggcctgaagccgattgttgttatcaacaaagttgaccgccctggcgcgcgtcctgattgggttgtggatcaggtattcgatctgttcgttaacctcgacgcgaccgacgagcagctggacttcccgatcgtttacgcttctgcgctgaacggtatcgcgggtctggaccacgaagatatggcggaagacatgaccccgctgtaccaggcgattgttgaccacgttcctgcgccggacgttgaccttgacggtccgttccagatgcagatttctcagctcgattacaacagctatgttggcgttatcggcattggccgcatcaagcgcggtaaagtgaagccgaaccagcaggtcactatcatcgatagcgaaggcaaaacccgcaacgcgaaagtcggtaaagtgctgggccacctcggtctggaacgtatcgaaaccgatctggcggaagctggcgatatcgttgcgatcacgggccttggcgaactgaacatttctgacaccgtttgcgacacgcaaaacgttgaagcgctgccggcactctccgttgatgagccgaccgtttctatgttcttctgcgttaacaccagcccgttctgcggtaaagaaggtaagttcgtaacgtctcgtcagatcctggatcgtctgaacaaagaactggtacacaacgttgcgctgcgcgtagaagaaaccgaagacgccgatgcgttccgcgtttctggtcgtggcgaactgcacctgtctgttctgatcgaaaacatgcgtcgtgaaggtttcgaactggcggtatcccgtccgaaagttatcttccgtgaaatcgacggtcgtaaacaagagccgtatgaaaacgtgactctggacgttgaagaacagcatcagggttctgtaatgcaggcgctgggcgaacgtaaaggcgacctgaaaaacatgaatccagacggtaaaggccgcgtacgtctcgactacgtgatcccaagccgtggtctgattggcttccgttctgagttcatgaccatgacttccggtactggtctgctgtactccaccttcagccactacgacgacgtacgtccgggtgaagtgggtcagcgtcagaacggcgtactgatctctaacggtcagggtaaagcggtcgcgttcgcgctgttcggtctgcaggatcgcggtaagctgttcctcggtcacggtgcagaagtttacgaaggtcagattatcggtattcatagccgctctaacgacctgactgtaaactgcctgaccggtaagaaactgaccaacatgcgtgcttccggtactgacgaagccgttgttctggttccgcctatccgcatgactctggaacaagctctggagttcatcgatgatgacgaactggtagaagtgactccgacctctatccgtattcgtaaacgtcacctgacggaaaacgatcgtcgccgcgccaaccgcgcaccgaaagacgattaatttcgttttttagtcataaaaaacctgccagcgatggcaggttttttttgcctgtcgtgagcgcacaccaatgcgagtatctcccttataagtctgtggttacgtcaatagagagctttgtcacaattatctgcaaagtcatacgccgttaattgctttcttttttggcgtaagcgtaagatgcttcatctggtttaaaccaaaaggattaaacaatggcggagaatcaatccaccgtagaaaatgcaaaagagaaactggatcggtggttgaaagatggcatcaccacgccgggtggaaaactccctagtgaaagagagctgggagaactgctgggcattaaacgtatgacgctgcgccaggcgttgttgaacctcgaggcagaatccaaaatcttccgtaaggatcgtaaggggtggttcgtgacccagccgcgatttaattacagtccggagctgagcgcgagctttcagcgggccgcaattgagcaagggcgagagccttcctgggggtttaccgagaaaaaccgtaccagcgatattcccgagacgctcgcgccactgattgcagtgacgccaagtactgaactctatcgcatcaccggctggggggcgctggaaggacataaagttttctatcacgaaacatatattaatcctgaagttgctccgggctttattgaacaacttgaaaaccacagtttttctgcagtctgggaaaagtgctaccaaaaagagacggtagtaaaaaaattgattttcaaacccgtcagaatgccgggcgatatcagcaagtatcttggcggttctgcgggtatgccagcgatcttaattgaaaagcatcgcgccgaccagcaaggcaatattgtccaaatagatattgaatattggcgatttgaggccgtagacctcatcattaatctgtaagtgttttatggtgacaataaataacgcaagaaagattctacaacgtgtcgacactcttcctctttatttacatgcttatgcctttcatttaaatatgcggctggaaagagtgttgcctgctgatttacttgatatcgcaagtgaaaataatctacgtggcgtcaaaatccatgttctcgatggcgagcgtttttctcttggtaatatggacgataaagaactctctgcctttggggataaagcccgccgtctgaaccttgatattcatattgaaaccagcgccagtgataaggcatctattgacgaagccgtcgccatcgcgttgaaaactggggcaagctccgtacgtttttatccacgttatgaaggtaatttgcgcgacgtattaagcattatcgctaacgacattgcctatgtacgggaaacgtatcaggacagcggcctgacttttacgatcgagcagcatgaagatttaaaaagtcatgagctggtgagcctggtcaaagaaagtgagatggaatctctttccttactgtttgattttgcgaacatgatcaatgcaaatgagcatcccatcgacgctttaaaaacgatggcaccgcatattacccaggtccatatcaaagatgccttgatcgttaaagaaccgggtggcctgggtcataaagcctgtattagtggtcagggtgatatgccgttcaaagcgttattaacgcaccttatctgcctgggtgatgatgagccgcaggtgacggcatatggcctggaagaagaggttgattactatgcgccggcgttccgctttgaagacgaagatgataatccgtggatcccttatcgccagatgagtgaaacaccattgccagaaaatcatttactggatgcgcggttacgtaaagaaaaagaagatgcaattaatcagataaatcatgtgcgtaacgtactacaacaaatcaaacaagaggcaaaccatcttctgaaccactaataagttttaactcatacgcagttaataaaaccattccatatgaatggtcggtatcttattgcctttaaaacagtgattttaaaaatcgcttaggggatgttatgctcacgaaaaagaaatgggcgttatttagtctattaacactgtgtggcggtacaatttataaattaccgagcctgaaagatgcgttttatatcccgatgcaggaatatttccatttgaccaatggtcaaattggtaatgctatgagcgtaaacagttttgtcaccacagtgggcttttttctgtctatttattttgccgataaactaccgcgcagatacaccatgagtttcagtctcattgcgacaggattactgggtgtttatttgacgacaatgccggggtattggggcatcctctttgtctgggcgctatttggcgttacttgcgacatgatgaactggccggtcttgctcaagagcgtaagtcgattgggcaatagcgaacaacaaggtcggttgtttggcttcttcgaaacagggcgtggcattgtcgataccgtggtggcattttctgcgttggcagtatttacctggtttggcagtggcttattaggttttaaagcaggcatctggttctattcccttattgtgattgccgtaggcattattattttctttgtcctgaatgacaaagaagaggcaccgtccgttgaggtgaaaaaagaagacggagcaagcaaaaacaccagtatgaccagcgtgctgaaagacaaaactatctggcttatcgcttttaacgtcttcttcgtttacgcggtttactgtggcctgacattcttcattccattcctgaaaaacatctatctattgcccgttgcgctggtgggggcttacggcatcattaaccaatactgtctgaaaatgattggtggaccgattggtggcatgattagtgataagatcctgaaaagcccaagtaaatatctatgctacacctttatcattagtaccgctgcgctcgtactgttgattatgctgccgcacgaaagtatgccggtctatttagggatggcatgtacgctgggctttggcgcgatagtctttacacagcgagccgtattttttgcacctatcggcgaagcaaaaattgctgaaaataaaacaggtgcggcgatggcgttgggtagctttattggttacgctccggcgatgttctgcttcagtctgtatggctacattctggatttaaatccggggattattggctacaaaatcgtgtttggcattatggcctgcttcgcattcagtggtgcggtggtttccgtaatgctggttaagcgtattagccaacgtaagaaagagatgctggcggctgaagcttaattaatggccggatgtgcttaatccggccaacgaaaaccgtatcaaccgtaggccggataaggcgtttacgccgcatccggcagtttcacatcagaagaaatacttcgtcccgatacggatctggttttgctcgcggtggtacggttcgacgttgcggtctaaccagcgcaattcgaaataagggagccagtgttcattaatacggtaacggaaggtgttagtgatttcccaatgatgatctttcccgttgctactattaaagtcattcactcgcatgaagtaatgtggctcaaatgtataggaaaatttatcggtgattttaaaattccagtaggtgccaatttcataggtgtcattattatccagttccccgctcaaatctgtactactatagttattatggttatagcgatttcgtactgtcagattaaaccatggtacaaatttatagttgacgtccagatacactgcaccaccgctaccgatactcttatcattaattaagccaccgggctggatggttaatttatcggttggtttaaataacggataccagccttcaatttcgttatatccatgttttagttcatcttctcgctgaaagttgtaggtattggttaacataatacccgcgcccatatcgaagttataacccacacgtagcataacctcgccctgatcggaggcaagattatatgcctccctgttttcgacgtatgcgccagcaaatacgctggcagaggtcagagaagataataaaattattgcattaatctttttcataataagtccattttttaaacgtagggaggccgccacccaccaggatggaaatagcggctattgacatttataacgttacggaagccgttttttcttctgtcgccatctctttatttttgcgttggttgatttcctcaataatcaatgcaaaccgtttttcattgagtgtgtaaaagaatcccatcgtcaatgcagcaataattgccagtgcacaaggccagataaaaatgagctgacgcaaaccctgtaatgtcgcatcgctttgcgcgatgttgggaacataaccaatttgcgtcagcataatgcctggcaagaagccagcaagtgcggcagaaattttacgaaagaaggtataaccggtataaacagaaccttcggcacgaataccggttttccattcaccgtaatctacggtatctggtaccagtgcccagttcaggctgtttacaaaggccgtgccaaaaaaggcgacacaagagaacatgacgaaagtgaaagagttacttccccagaaataattcagtatatcacccaccgcccacagcaccatgccagccagataaacctgttttttaccaaaacattttacagttaatggcaccagtaatacgccgatgaggatgcatcccatactgaagaatcccatccagctcaataaattaatatcattcagcacatactgggtgtaatagacctgaatcgccagtttgatattaaatgccgccagggtacacaagttagcaatgcataaaaccagcaatggcggattccgaaatatcgcgcaaaaacttttgagaatactggctttatgtccggttggcgttgtgtccacataatgctctttgacgcctctgtagcacagcatcataaaaataaagccgccaatggagaacataagtgccgcacaggcataaccgacggtactgtcagaaaaaaggctctgcaacggaataaacgccacggtacaaatcaatagccctatggttgcaccaccctggcggtaagccgcgagctgcgcgcgctcattcgggtttttggtaattgccgggatcatcgcaccatagctgcagttcatcagactgtaactaagtccaaacatcataaacagcgcggtggcaatcgtcgttttaaccggcaaacaaaaggtggtggcgataaactggagcgttgcaattaacgccgccggaaccgctgcatataaaataaagggacgaaatttgcctttaggcccaatatttttccggctgtcgagtaaaaatccggtgagcatatcggtaaacgcggtaaaaaacttcgccaccagaaagataatcccgccatagtaagcaggcatccctaattcatcggtataaaatttgaggagatacagagtaccgatgcagagcattaaattgctaccgacgtcgcccataccataggcgattttttcccgcagattcagttttaatgtcagtggattatggtcagacataatcactccttataacgccccgcagggcgtcgtttattattattacgccgtgcgtttacgggcttctatctcttccacaatgcggacatacatcttctcgttcaggctgtagaagcaacccatcgccacaatggtgactaccgccagtgcgcttgggtagatgaagatcaactggcgtaacccttcaatggtgtggtcagcctgtgcgacgttcggcacatagccaatttgcgtcagcatccagccggggaagaaaccagccagcgcctgagacactttgcgaaagaaggtaaaaccggtgtagaccgttccttcgctacgcacgccggtgcgccactcgccgtactcgacggtgtcggaaaccagcgcccagttcaggctgttaacaaacgcactgccaaagaacgccaggcaggagaacgccacgaagctgacgctaccgccgccgaagaaatagttgagcagatcgcccagcacccaaatcagcaggccgccgatataaactttcttcttgccaaaacgtctgacactggcaggcatcaggaatacgccgatgaaaatacagcccatgctgaaaaatcccatatagctcaacaggatgggatcgttaagcacgtactgggtgtaatagacctggatggcgagcttgacgttaaacgcccctaaagtgcagaggttggcaatgcacagaatgaacagcgggcggttacccgcaattgcgcggaaagattgcagcaggcccggcttttgcgccggattagcaggctgggtttcgacataacgctctttcacgccgctgtagcagatccacataaacagcaggccaaacagactaaacagcgtggcggcgaagatatagccaagttgctgattaccttcgataagattcataactggcacgaatcccaccgtgcacagcagcaggcccagcgtagcgccgccctgacgccatgccgccagactggcgcgttcgttggggtttttggtgatagcgggaaccattgcgccgtaggagcagttcatcatgctgaaaaacagtccgtaaagcataaacagaatagtggccatcaccgttttaccggtgacatcaaacggtgtgccgacaaagttggcgatcgccagtaaggtgaccgggaaactcgcatacagaataaaaggacggaacttaccttttggaccgatcttgcgtcgggaatccaacataatgccggtacccatatcggtaaacgcagtaaagaatttactaatcaaaaagataatgccgccataggtgcctggcagccccagaacgtcggtataaaacttcaaaagataaagcgtaccgatatccagcaggatgttagaggccaggtcgccaataccgtaagagagtttctctttaaagggcaggcgtaaagttgctggatcttccgttgtgatgtgactcatgcttgttctccctttgcccatgagtttccccacgggcggatgtgattagatgctttttaagctcgcgaacagtgccgcccattcgctatcggcgcgataaaagaccggcggcttgccgatgggcgcattaacggtaacttccccgccccggaacgcttcacccgtccaggcgtggacccagttatcctccggcagatagagcgtccagtcgctacggccttcttcatgcaccggagcgaccagaatgtcgcgacctaacaggtactgatatttcagggtgtaagtgtgcgcatcgtcttcgtaatgcaggaacagcgggcgcataaccggcaggccggacttcgcattcagcgcgacggcctctttcaggtaaggtttcagggtggtgaagacggtggtcatacgggcgaaatgggcgatggtttctgcgtcgccgtcaaactgccagttgtcgccaggacggttaccttcgtgggtgcgcatcatcggcgtgaaggcgctgaaatcgcaccagcgcagcagcagctctttgctgcgcttcatctcaaacagggtggtgtaaccgccaatgtcgctgtggtgcaggccatgtccggtcattgccaggctcagcgccgccgggacaacgctcgccaggccatcgtcgagactccagtcgacgttctggtcgcccgcccacatcatggtggagtatttctggctaccggtagaaccggcgcgcataaagaaaaggatctcgccgagcttgcccgtttcttcaagggcttcgtagttacacttcgcccacagcgcaggccaggcgttatgcataatttcggcactgacgccgttatgcaagtacgtgtcggtgggcagatactcgccgaagtcagccatccagccgccgcagccgagttcaatcatgttctttttgatcacttccttgaaccaggcgtaggcttctggattagtgagatcgacaacgccgccgtaaaactcgccaaactccaccagatagtcaccgccagaggcatcttttgccagatagccgtgttgtgccgcttcttcgcagagatctttatcgctggcaacatacgggttgatataggccaggaactgcacgccctcctgattccactgcttaatgcgactatccagttgcgggtagttttcgctgttccacttccagttccacatcacgcgtttgccaaaagaggtcatacgaataccggaccagtcctgcgcccagatgccgttgaccttcacgcccgcgttacgcatggtgtccagtttcttctggcacacttccgtcccgccctgaatgccgagcgttactccgtcataaatccagtcgggcagttctggctggcgtcccagcagggcggttaatttttccagcagggaaatgtatgtgtcagcacattcaaaacgcagcgttgctttgtcttcccacagcgccagttcatggtattccggggcactaaagtcgaagttcatatagcaactgttatcaacatggcagtaatacttctgcgtgctgacaaacgtaggctgtgggaagaaagtccagtaatagtcgccgcccgcattttctttgcagtcggcctgccaggtgacataggtttgtttgttgcgaccaacgccttgttcactggtccatagcgggaacggtttgccacgcagatcgaagtaggaaaactgttcgccgcagccgtagatatggtcctctggttgagcggcaaggcgcagccagatacggttgtggttaaggttgtcgttttgtagttccagcaataaacgcccctgatcgtcggcagagatattcagcgtggcgctaatgtcagaaccacggctgaaatgaattaaccaaccatccggactctggctgacgatggcgtcggtaagcgcaattttctcctgtagtttatctttaatgctgaaattaccgcggaacatatcgatatccgctataccactgccaatccataaacaaggattatctttgctatgggttaaaataagacgttgttgaaaatgtagggtaaaactgtcgttattctgatgaaattgaaaatctaataactgtggacgtggcgtatccataactaatctccatagagttgagaacgagattgttgccttcctgttattacaggcttatgtaaaatgattctcataaaactgatatataaaaactttacagaagctgagctgtttttaacttaataaattgaagatacataatgttgcctttagcgagtgaaatgttcttcaatgattttgactgctaatcaatacaagttattttctctgtccgtaaatattaaaaaacaggcggtgcggttttccactttccagtaataataagtcgataccactattaaaggcgttaggcgggcaactcataggttcaactgccagtccctgacgctgtaatttttcaccgctataaacctgcacccagagttgatcggaacaaaggcttacgctaagcgcctgctgtggatgggtaatggtcatttcccacaaatcattagcggttttaaaggtgtggtcgatttttgtcgcggctatttttttcgcctgcgtgaaatttaaatccagctcatcaacgtggtgaagcgttgtcggattcgcgtgctcatcgacggcataaacctggtttgccggaagctggaacagatattcatcaacagatgttaagttgcaggttaaataaggatgaatacccacgccataaggcgctgcgacagtgccgatattctggcttgcgatctcaacggaaagacccgtgtgtgcgttgaggctataaacaacttgactagccagcataaacggatagccgtaactgggcggcagaaaagctgtcagggtaacgctggtggcggttaattcactaatttgccagtctcgccaggcaagcagcccgtgaatagcggctttactactatgttcattaatgggtaactgatattcctgcccctgatagcggtaacagccgttggcgatccggttcggccacggaataagcactttacccagatgcgccagcggcatctcttcgggtttgtgcgggatgactaaatgacaaccctgaaaggttaattcagccagaccagcaccgacggtcacaatggtcgcgtgataatcccccgcggcaagactaacggtctgtccactgcaatgcatattggtgatttgcatacaaggcaccttaattaagctcatacagcctcccgtgaggctgatgtcaaacccaaaaactgcaccggacggtcccctcgcccctttggggagagggttagggagaggggaaaacccgcaccctattttcagatcagttatttcgcattaatatccagcagacccgctgcaaccgctggagccatgccgggcgctaacgggatacgcgggatcaccaggcaatgcagcaggtgataaatatcctgtttgccgtcccagactttggtggtgaccttattgtccgcatccagctcctgccaccaggaaccattttcatagtccatcaggtacttaatgcagtactcccaccatgtttgataccaggtttcatactggcgatcgccagtgacggtgtagagcgcgtaggccgtacccattgcttcgacgataggccaacgtacacgttcgcggaccaccggttttccttcccagtcaacggtataaacaatcccgtccgcgccatcgggtgcccaggcatcgcgcacggtggcgttaaacagacctttggcatcttctagcagccatgctggtggttgttcgcaacgggcttccagggcagcatggatgtgcagcattaaacggccccattcgatccagtggcctggtgtacctccgaacgcgcggaagcgatgcgccgggttatctttgttgtaatccggcagcggattccactgggtatcgaagtgttcgttaacgcgataatgattatttctggcgacgtcgtggataatcacggaagccacgcgaatcgcgcgatccagccattttttgtcgtgagtgacgtcataaacaatcaagaaagcttccaccgcgtgcatattggcattgccgccgcggtactcttcggttttgctgaaggcttcgtcccaggattccaggcacatctgctcttcttcgctccagaaatatttctcgataatttcaatggtgtaatcgagcagcttgcgcgcttccgggtgacccgttgtgacggcgctggcggcacccagcagagcaaagaagtgttgatagccctgtttggaggcatccaccacgccctcgtcattcacgcaggcataccagccgccatattttttatcacgcagtgcgccgttcatggctttgataccgtgatcaaccaagctgtaagcgccaggtcgacccatcgccgcagcaacggaataaacgtgcaacatacgagcggtgatccacagatgggtgcccatctcttctttgatttgccctttattgcctaaccagccaaaaccagtcggcactacggaatttttaccaaaatcaaagatgcggtcggtttcctgttccagccaacggttgtggcttagggtgttaaaccatttcattccttttatcctcatcttagcggcgtttagccatcatttcgtcgacgatatcgccaagttgttgtaatttcggtgcgcaaacgtcacgcagcatcagctcgttgtctggtaaaccgacgacgcttgcccagactgcacggcctgccaggaatccgcttgcgcccgccgtcattgccacgcgtacggcacgcgggaacagtttttcgtcgacaccggaagagaggatcacccatggcatattgatatggtcattcagacgttgactagcacagagaagctcttgttgcggacctttgccataaagcggcatttcaactttgtagaggtcagcgccactgtcgcccagctctttggcggcatcgatgatcgcttgttcgcgatcgaatttatcgccacgacgcggtgggcggacgactggctcaatgatgcttaccagaccgtgactgtggcacagttcgttgaactctttcaccatatccagacgttgctgcgcatcttcatcactacgccacagcaccagcagttttaaggctttgccaccgtcttgtttgatctgtagcggattgattttgcggtcaataaccacgctatcgaccggaataccgttgccaggaatgaactcatcggcggcgacaatcatggcgcaacttttggcaatcgcgttttgctcaaccacctggcggtagcagaattgttgatctaccagaatcgcgctggcataagggctgagggcctttgcagcgttaactttgaaatcagttaaaacgctatcggctaccggagcgggtgccccagccgcggcaaacatcatgcgcatggcttcgcgctgatcgaccgccagcatggcaaaaccgccgcttgcgcgcgtaatgtcgttgatggtgtacttattcattcatttattcctttatccagtcgttacatttttactttggcagtcatcccggcactgacacggacctgttccagaatggcggaccagtcctggcgaccgcgacccgctgcgcgcgcctggctataaacctcccgactggcggcccccagcggcattggcacatgcagctggttggcgacatcaagggcgatgccaagatccttatgggcaagatcgatcatgaaggcgggagaaagatctccgctgaggactttgtttggccaggaagtggtgaagtgacctttaccggcggcggtaccgctcatcactttgacggcaacatcgaagggaagattcagggcttcgcacaaaacggcggcttctgcgctaagcgcattgagcgcgatgctcatgtagttgttgatgagcttaacgcggatccccatgcccggaccgccagcgttgatcaactcactgcccatcgccatcaggatcggtgtggcacgttcaacttgttcagcggtgccgccagccagcagtaacagagtaccggtaatggcatttgcagaagtacggcctaccggaacatccatcatgctgaagcctttggcttgcatatcggcaatcaatttatcggtttgcagcggatggatggtggacatatcaatgaccagcgcatcggtagataagccttcgcaaacgccgttttcaccgaacaacacgttgcgcaccagatcgccattcggcaacatggtaatgataaattcggcatctttagcggcctgcgccgggttggcggcgggagtcgcacctttgtctaccagatgccgcacagcttcggcgttcacatcaaagacgcgaagttgatgcccttgctgcaataaattgctcgccattgggctacccatttgtcctaaaccgataaacgcgattgctgccataaccctctcctgaatacagttatgtcactttttgtcatttatgacatgctttgcttgtctgtttttgatcgtatttgtaatttatcgtcaaaaaattgacagccgtcactttttaaacaattggtgaaattaaaatgaacgcatcccaaaatgtttaaggaatgaccatgattcgtgttgcttgtgtaggtataaccgtgatggatcgcatctattacgtggaagggttaccgacggagagcggtaaatacgtggcgagaaattatacggaagttggtggcgggccagcggcgacggcagcggttgcggcggcaaggctgggggcgcaggtcgattttattggtcgcgtaggtgatgacgacacgggcaacagcctgctggcagagctggaatcctggggcgttaacacccgttacaccaaacggtataaccaggcgaaatctagccaatccgccatcatggtggataccaaaggcgagcggataatcattaactaccccagcccggatctgctgcctgacgcagagtggttggaggaaattgatttctctcagtgggatgttgtgctggcagatgtacgctggcacgacggcgctaaaaaagccttcaccctggcccgtcaggcgggtgtgatgaccgttctggacggggacattacgccgcaggatatcagtgagctggtggcattaagcgatcacgcggcctttagtgaaccgggtctggcgcgcttaacgggcgtgaaagagatggccagtgcgctaaaacaggcacaaacgctcacaaatggtcatgtctatgtgacccagggtagcgcaggctgcgactggctggaaaatggtgggcgtcagcatcaaccggccttcaaagttgatgtggtagataccacaggtgcgggtgatgtttttcacggcgctttggcggtggcgctggcaacaagtggggatttagcggagagtgtccgcttcgccagcggtgtagcggcgttaaaatgcacacgtcccggtggacgagccgggatccctgactgtgatcaaacccgatcttttttgagtctttttgtataaaatgccagggtgatggtttttcgaggaattttcatgagccttaccgaactaaccggtaacccgcggcacgaccaactcctcatgctgatcgccgagcgtgggtatatgaatattgatgagctggcaaatctgctggatgtctccacgcagacggtccgccgggatattcgtaaattaagcgagcaaggcctgattacgcgccatcacggtggcgcgggtcgggcttccagcgtcgttaatacggcgttcgagcagcgtgaggttagccaaaccgaggaaaaaaagcgattgccgaagcggtggcagactatattcctgatggtagtacaatatttatcaccattggtacgactgttgagcatgttgcccgggcgttacttaaccataatcatttgcggataatcaccaacagcctgcgtgtggcgcatattctttaccacaacccgcgctttgaagtgatggtgcccggcggtacgttgcgctctcataatagcgggatcattggccctagtgcggcgtcctttgtggctgattttcgtgctgattatctggtaacaagcgttggggcgattgagagcgatggcgcgttgatggagtttgatgtaaacgaagctaacgtggtgaaaacgatgatggcgcacgcgagaaatattctgctggtcgccgatcacactaagtatcatgctagcgcggcggttgaaattggtaacgtggcacaggtcactgcgctctttaccgacgagctgccgcccgctgcgctaaaaagtcgcttacaagacagccaaattgaaatcattcttccccaggaagacgcgtaaatttttgtgaccgttaacctggcttcataccttgccacatagccaaacccatcctttcccgctacagttaatttcttgtggcgcgaaaggaggcaaaaatgctctatatctttgatttaggtaatgtgattgtcgatatcgactttaaccgtgtgctgggagcctggagcgatttaacgcgtattccgctggcaagccttaagaagagttttcatatgggggaggcgtttcatcagcatgagcgtggggaaattagcgacgaagcgttcgcagaggcgctgtgtcatgagatggctctaccgctaagctacgagcagttctctcacggctggcaggcggtgtttgttgcgctgcgcccggaagtgatcgccatcatgcataaactgcgtgagcaggggcatcgcgtggtggtgctttccaataccaaccgcctgcataccaccttctggccggaagaatacccggaaattcgtgatgctgctgaccatatctatctgagccaagatctggggatgcgcaaacctgaagcacgaatttaccagcatgttttgcaggcggaaggttttagtcccagcgatacggtctttttcgacgataacgccgataatatagaaggagccaatcagctgggcattaccagtattctggtgaaagataaaaccaccatcccggactatttcgcgaaggtgttatgctaaaaaccattcaggacaaagccaggcaccgtacccgtccactatgggcctggctaaaactactctggcaacgcattgatgaggacaacatgacaaccctggcaggtaaccttgcctatgtgagcttgctcagtttagtgccgctggttgccgttgtttttgcgcttttcgccgcttttcccatgttttccgacgtcagcattcagttacgtcactttatttttgccaactttctgcctgctactggcgatgttattcagcggtatatcgaacaatttgttgccaattccaacaagatgaccgccgttggggcgtgcgggctgatcgtcaccgcgttattgttgatgtactccatcgatagcgcgttgaataccatctggcgcagtaaacgagcgcgaccaaaaatttacagcttcgccgtgtactggatgattttaacgctggggccgctgctggcaggggccagtctggcgatcagttcctatttgctctccctgcgctgggcgagcgatctcaatactgtcatcgacaacgtgctgcgtatttttccgttgctgttgagctggatctccttctggttgctgtacagcattgttcctaccatccgcgtacctaaccgcgacgcgattgtcggcgcgtttgtcgccgcactcctgttcgaagcaggaaagaaaggtttcgcgctttatatcaccatgttcccgagttatcagctcatttatggtgtgctggcggtgatccccattctctttgtttgggtctactggacatggtgtatcgtcttgcttggcgcggaaattactgtcactctcggggaataccgcaaactaaaacaagcagctgaacaagaagaagacgacgaaccatgattgcattaattcaacgcgtaacccgtgccagcgtcaccgtggagggagaagtgacgggcgaaattggcgcgggacttttggtgttattgggtgtcgaaaaggatgacgacgaacagaaagcaaaccgtctgtgcgagcgtgtgctcggctaccgcatctttagcgatgccgaaggcaagatgaatctcaacgtgcaacaggcgggcggcagtgtgctggtggtttcccagtttaccctcgccgcagataccgaacgggggatgcgcccaagtttctccaaaggtgcaagtccggatcgcgcagaggcgttatatgactatttcgtcgaacgctgccgtcagcaagagatgaacacgcaaacaggacgcttcgctgcggatatgcaggtaagcctggtcaatgatggccccgtgacattctggttgcaggtatgagccagcttccagggttgagtcgggaaacaagagagagtatcgctatgtatcaccttcgggttccacaaacagaagaagaattagagcgttactatcagtttcgctgggaaatgttgcgtaagcccctgcatcaaccaaaaggtagcgaacgcgacgcgtgggatgcgatggcgcatcaccagatggtcgtcgacgagcagggtaatctggtggcggtaggccgactgtatattaatgccgacaatgaagcgtccattcgctttatggccgttcatcccgacgtgcaggacaaagggttaggcacgctgatggcgatgaccctggagagcgtggcgcgtcaggaaggcgttaagcgcgtgacctgtagcgcccgtgaagacgcggtggagtttttcgccaagctggggtttgttaatcagggagaaatcaccacgccaaccaccacgccgattcgccattttttgatgattaagcccgtcgccactctggatgacattctgcatcgcggcgactggtgcgcgcagctgcaacaggcgtggtacgaacatatcccgcttagtgaaaaaatgggcgtgcgcattcagcaatataccgggcaaaaatttatcactaccatgccagaaaccggcaatcagaatccgcaccatacgctgtttgccgggagtttattcagtctggcgacgctcactggttggggacttatctggctgatgctgcgtgaacgccacctcggcggaacgattattcttgcggatgcgcatatccgctacagcaagccgattagcggtaaacctcatgcggtagccgacctcggtgccttaagcggcgatctcgaccgtctggcgcgcggacgaaaagcacgggtgcagatgcaggtcgaaatctttggcgacgagacgccgggtgcagtgtttgaaggcacgtatatcgttctgcccgcgaagccatttggcccgtatgaagagggcgggaacgaagaagagtaactgatggagaggggcggtgctgcctctctcattcaggtcatttatattagtccttggctatttcggttatattaaataagaactctataaatttttattcttcgttggctccatacgtgtcttgctacatcactgttcaggagcatttaaatattatttgtagaactgagtggcaattatcgcagataatgcttaattcatcatcttagttcatgtttgagcgatttttgatagtcaaaaccccctctggtgccatacttttctcataaatatttttaaaatctatagctaacaaatattatgcaaagataatggactagcatcattgtcagtatcattcatttactgctctgtatgttatgaataattatgttgtatgtttgctcttaaaccgtgggaaggaggctataatggttgccaatattaatctcattaaacaagaaagttattctgttgttaatttagaaaaacaactttcccgaactgttaccaacaaaattataacgatgagcaagtaaagaccggttggtggcagtactgaccggtctgtgatgaaagattaatttcaccttaaatcctggtgctgttaggatgctgacgtttttcggctacaccattcagattatgcaaataaatatctctgaatataatatattcatagcacccataattcatcctgggcgataactaaaccatttttgagtaataaatgaaacaactgcaacactcttattatttctggaaaacgcctcgcaaaaacaaaacaacatgcaaaaatccgctttttttaaatgattttccggcgtaattttcgcacatacattaatgagtaatatatgtaaggtattggtaatggcgatgaatacggtttttcttcatttaagtgaagaggcaattaaacggctgaacaagcttcggggctggcgtaaggttagtcgatctgcaattttacgcgaagcggtagagcaatatctggaacgtcagcaattcccggtgcgtaaagcaaagggaggcaggcaaaagggggaggtagttggtgttgatgatcagtgtaaggagcataaggaatgacaaaaatttttcattcttgaatataaaaaacagatgcccttattctggtattaatacaaggctgttttacttgaacttataataactgcaactgttacatcatatctggaaaacgcctcgcaaaaataaaaaatgatgcgtaaatgagctttctttaaagattcggcaagggtacttttctctccatagattcaaaaatgatattggcgagatatttatgaactctctggcaggtatagatatgggcagaattttactcgatttaagcaatgaggtgattaagcaacttgatgatctcgaggtgcagcgtaatcttcctcgtgcggacctattaagggaagcggtagatcaatacctgataaatcaaagccaaacagcaagaaccagtgttcctggcatctggcaagggtgtgaggaagatggtgtcgaatatcagcgtaagctgcgcgaggaatggtaatgggaaaaaatgatgtcaatcagattgctgacaacgtgcgcgttgttcatgccggatgcggcgtgaacgccttatccggcctacaaagtcgtataaattcaatgtattgcagtttattggtaggcctgataagcgcagcgcatcaggcaatcttacgcttgtcatcagtctcatgcccataaccttattgatgtggtggtgggtaaattgaggccaaaccggcactggcggcatagcttgaggtggtaacgcggaatacgagagatggtgtcgtcacaccctatgagctgtaatccgggcgacctgcgccacccggaaaacgtcagagattactctccttcacccggaaacaggaacgggttgatggaactgcgggcatagccttcttgctccattcgtgcgtccagtaccagagaggcgaggtcatctgctacggcttcgatttttggatctttttcctgatagagaattttcaggtaagtgtcgcagtcatcgcagctttcggctttaatcgcggcctgttcgtcatccaggctccagtaatgcagtttgccgctctgctcgcagttgctgcattttacgcgcactacgtgccattcagtttcacacaggttgcagtgcaggtaacgtagcccctgagtggtgccaatttgcaccatgctggacaccggcatagaaccacaaaccgggcaatattgacgttgctcgccgtattcagcgcgggctttgccggggatcagattggccatctgcgcccagtagaggctcagtgcagcccagataaacggcgctttatcgctgctgacggagctgaaatcagaggcaaacagcgcgctggccatatcttccagctcctgagtgcttgccttctccagattctcaatcactgccagcgccgggccgctcatttcaggtttcagctcagcaatcagcgccatcagcagcttttgccagtgcttatcacgcggcagaacgtgaatatccagcgggggcttgccttgtgcgctggcttctttaatgcgcgcagtcagatccatctccagcggatggtcgtacagcaccacttcctgggcgtgggcgataagcgcagcaaagcgcaggtaatcacccagaggattattttctgccagctcgcgcagacgctcggcgcggcggttgtataaattcttgagccgagggaacaataacggcggaatcatatccgccgtacgtttctcgctactacccagctcatcttgcgggattatgcgaatactcattcagctttcttttccgttgtcttgcggacctcacggtaccagcgcgggtgatgtttcttcgcccaggcgctggtaacccatccttccaccatggcggtaatcgtgcctttcacccaaagggcggcgtagatatgcaccatgataaccacaattaacgccactgcggcaaaactatgcagcattaacgcgaatcggatcaccgggatactgaaagcaggcgcaaaataaggacgccagataatcacgccgctcaccagcagcagaaccaggaaaataatcgccgcccagaaaacgcatttctgaccgaagttataacgcccggtgtcacctacttcctcgttgacgacgatcttacgaatattcttcgcccaaaagatatcatcccgattgattaggttgtgatgccagtaacggaaaaacatgatgatgaagctggcaaacataaccacgccgacaaacgggtgcagaattcgcgccagctgcggtgtgcccatgatttgcatcaaccagttgaaggacgggaacaaaaagcccagcccgctcaccgccgccaggatgaagcagaaggcggtgatccagtggttgatacgttccggcgcggtgtagcgcacgatggtgtcacgtcgtttcatttgcgctcctcgtctttctcttcgtgcagattattctcttcctcatccgcacggttcggaccgacacccacgtagtggaagatactggccgcaaaggtagccgcaaagccaacagccgcgagcggtttccagatgcctttccagaatttcacggtttcgctgatttccgggttctccggcaagccatgatacagatttggcttgtcagcatggtgcagcacgtacatgacgtgtgtaccaccgacgcctgccggatcgtacagacccgcattgtcgtaaccgcgggttttcagctcagcaacgcgctcgctcgccagcgttttcatgctctctttcgtaccgaagtgaatcgcgcccgttgggcaggtcttcacgcaggctggttcttgcccaaccaccacgcggtcaacgcacagcgtacatttgtagacgcggttgtcttccgggttgaggcgcggaatgtcgaacggacagcccgcaatgcaataaccgcagccaatgcactgctcggactggaagtcgacgataccgttggcatactgaataattgcaccttccgccgggcacgctttcaggcagcctggatcggaacagtgcatacagccgtctttgcggatcagccattccagtttgtcgttctgctccacttcgctgaagcgcattaccgtccagcttttggcgcttaaatcattggggttgtcgtacaccccaatgttattgccgacggtatcgcgaatgtcgttccactcactacacgccacctgacaggctttacagccgatacaggtggtaacgtcgatgagtttcgccacttcttcctggaagtcccgcgcctgaggcgcgggggtcagaccgttagtcgcggaacgacgaatgatatcttgagattgataagccatatgtcgtctccgttacaccttttccacattcacaaggaaggacttaaactccggcgtctgcgtgttcgcatcaccaacgaatggcgttaaagtattggcaataaagccttttttagctacgccttcatagccccagtgaatcggaataccgatggtatcgatatctttgccgttcgctttcagcgtgcgaatacgtttggtcaccaccgctttggctttgatatagccacggttggaggagactttcacggtatcgccctgggcaatgccaagtttattcgccaggctctccccgatttccacaaactgctctggctgcaaaatcgcgttcaacagcgcgtgtttggtccagtagtggaagtgctcggtcagacgataggtggttccgacatacgggaacttatcggctttacccaatgcttcggcgtcgtctttaaagatacgtgcagccgggttgctgataacgtttggatgcagcgggttagttcccagcggcgtttcaaacggctcgtagtgttccgggaacggaccttccgccatcttatcgagggcaaacagacgccccatgccttcctgctgcatgataaacggcccgacgccgctacccggaggcgctgcgctgtagtccggaatatcccagccggtccacttagtgccgtcccatttcagcaactgacgcttcggatcccacgggttaccctgcggatctgcggaggcgcggttatacagaatgcggcggttaagcggccatgcccatgcccagcccagcgtgttaccgaggccagacggatcggcgttatcacggcgtgccatctggttgccttccggcgtccagctaccggcgaaaatccagcagccacaggaggttgtaccgtcatcgcgcaattgggcgaagctactaagttgttggcctttcttgacgataaccgcaccggttgccggatcggtaatatcggccagcgccttaccgttgctctccatcgccacttcttcactagatggctcatgcggaatggcgtagttccatgtcatgttcagcacctggtccgggttcgcgccaccctgttcggcatacatcttgcgcaagcgcaggaagataccggagaggatctcgccgtcagtcagcgcaatccccggggcgtccgcacctttccagtgccactgtaaccagcgaccactgttaacgatagaaccgttctcttccgcgaagcaggtgcttggcagacggaacacttcggtctggatcttgctgctgtcaacttcgttcagctcaccgtggttctgccagaagttagaggtttcagtgttcagtgggtcgatggtgacgaggaacttcagtttgctcagacaaccgatcactttgtttttgttcgggaaactggcaacagggttaaagccctggcagatatagccattgaccttgccctctttcatcatctcgaagtattgcaggacgtcgtagcctttatcccacttcggcaaccagtcaaagccccagctattttccgccgtcgctttatcaccaaagaaggccttcatcatagagacgaagaatttcgggtagttgccccagtagtttacctggccttccagcagcggttttggcgtgttggcggtaaggtaggtttgcagatcggtctgcttctcgcttggcagcgtcatgtaacctggcaggctctggctcagcagccccaggtccgtcagcccctgaatattggagtgaccgcgcagggcgttaacgccgccgcctgccatccccatattgccgagcagcagctggatcatcgccatcgtacgaatgttttgcgcaccaacggagtgttgcgtccagccgagggcatacaggaagctggcagttttatcgtgagcactggtttctgcgatgtattcgcagactttcaggaacgcgtcttttggcgtaccacagatgttttcaaccacatctggcgtgtagcgggaaacgtgctgtttcagcaagttccacacgcagcgcggatgttgcagcgtggtatcgcgtttggcgaagccgttttcgtccagttcataagtccaggaggatttatcgtacttgcgtttttccgcgtcgtagccggtgaacaggccatcttcaaagccgtaatcctcacgcacgatcaggctggcgttggtataggcttcggtgtattcgcggttgaatttttcattgttcagcaggtacagcaatacgccactcaggaaagcaatgtcagtaccggaacgaataggggcatagtagtcagctaccgccgccgtacgcgtaaagcgaggatcgatcacaatcagcttcgcgccgttgtgaattttggcttccatcgcccagcggaacccgaccgggtgagcttcagcggcgttaccgcccatcaccacgacgaggttggcgttcttgatgtcgacccagtggttggtcatcgcaccgcgaccaaatgttggagcaagacttgctaccgttggtccgtgtcagacacgcgcctggttgtcgaccgcgagcatacccagcgcgcgggagaatttttgcgttaaatagccggtttcgttactgctcgcggaagcacacagcatcccggtggagagccagcggttaacagtcacgccttcggcgttttgcgcaatgtagttagcatcgcggtcttctttcatcagtttggcgatgcgatcaaacgcctcttcccaactgatttgctgccatttatcagaacctggcgcacggtattccggaaacttcagacggctttcggagtggatgaaatccaccaggccagcgcctttcggacaaagtgcaccgcggttgaccgggtgatccggatcgccttcgatatggaagatagatgctttggcgttttttgctccgtcaccgaggctgtacatcaacagcccacagcctacggaacaataggtgcaggtattacgggtttcgcgggtgcgcagcagtttatactgccgggtttccgcgagtgctacgctgggtgcaaaacccagtgccgctgccgtggtgcctgccataccgccagcgcagatcttaaagaactgccttctgctgacctgcatggattgctccttgtttcgacattgtcacgtcccatttacattcgcttgctgcgtgtgcagggagtgggagttatttttctttgcggaaggggccgcaaaggtccagaattggctcaatttccctccatccaggaagggtttgtaacagaataccataatgttggtgtgtgtgttcttatctggttaagagaaagtgaaaaaaacacagcgaaaagaaatcgaaaatgtgacaaatatcacaggtgttcgtcaaattgagttatggcggcgtgatgatttacaacacccacggttagatgaggtcgcggaagaagttcccgttgcgctggtctacaacggcattagccatgtggtgatgatggcgagccccaaagaccttgagtactttgcgctcggttttagcctttccgaggggattatcgaaagtccgcgcgatatcttcggcatggatgtcgttccttcctgtaatggtcttgaagtacaaattgagctttccagccgccgctttatggggttgaaggagcgccgccgggcgctggcgggacgtacgggctgtggcgtatgcggcgtggagcaacttaatgacatcggaaaaccggtgcagccgctaccgttcacccagacgtttgatctcaacaaactggatgatgcattacgtcatctcaacgattttcagccagtggggcaactgactggttgtactcacgccgctgcctggatgttgccatctggcgaactggtcggcgggcatgaagacgtgggtcgccatgtggcgctggacaaactgttaggccgccggagtcaagaaggggaaagctggcagcaaggtgcggtactggtttccagtcgtgccagttatgaaatggtgcaaaagagcgcgatgtgcggcgtagagattttgtttgcggtgtctgccgcgaccacgcttgctgtagaagtggctgagcgctgtaatctgacactggtaggtttttgtaaaccgggtcgggcaacggtttatacccatccgcagcgtttgagcaattaattaaaataagtcctgcgaaatatattaaattgcaggacttattcatttcgtgaattttattattttatttataaacaaaatgcgtgtagtggcgttttcttttttcatttattatgttcactctcttatctatatatttataaggcaattaaatgaaaaggaatttattatcttccgctattatagtcgccatcatgtccctcggtctgacgggttgtgatgataaaaaagccgaaacagaaacgctcccgcctgccaatagtcaacctgccgcaccagctcctgaagcgaaacctactgaagctcccgttgcaaaagcagaagctaaacctgaaacacctgcgcaaccggtggtcgatgaacaagcggttttcgacgaaaaaatggatgtctatatcaagtgctacaacaagttacagatcccggtacagcgcagtctggcgcgttatgctgactggctgaaagattttaaacaggggcctaccggtgaagagcgtactgtttatggcatctacggcattagtgaatccaacctcgctgagtgtgaaaaaggcgtaaaaagtgctgtggcgttaacgcctgcgctgcaaccaattgatggcgtggcggtgagttatatcgatgctgccgtggcgttgggtaataccattaacgaaatggataaatattacacccaggaaaattataaagacgatgcgtttgcgaaagggaaaacgctgcaccagacattcttaaaaaatctggaagcctttgaacctgtagccgaatcttatcatgcggcgattcaggaaattaatgataagcgtcagcttgcggaactgaaaaatattgaagaaagagaagggaaaacattccactactactctctggcagtcatgattagtgcgaaacaaattaataacctgataagccaagataagtttgatgcagaagcggcaatgaagaaagtgtctgaactggaaacgctagtggcgcaggccaaagaagcggataaaggcggcatgaatttcagctttattaatagcgcaggccagtatcaactcgaggctaaaaaatacgttcgccgcatcagagataaagtcccgtactctgactgggataaagagcaacttcaggacgcaaacagtagctggatggtcgaagactctttcccgagagcattacgcgagtacaacgaaatggttgatgactataatagcctgcgttaaacgtttttgatgataaatgcagtgtcggatgcggcgcatccgacacagttcaccccttgtgaagtaactccataaatgcctcatatcctgttaacccggcaataatctccgccggatgctgacacaatatgcttgccagatagctaaatatttttagctcatgacgcgcatcggcggcggcgcaggcgatcaagacatggttaatgacttcgttattcacctcaactggttgggcgagggtaataaaaaatccacgaaaacgtcgctcctgttcgctccagcaatgtgggatggcgaggcgattaacaatcaggttttcaccttcgccttcgcgggcgatgatgcgttgtgcttcatcggcggtaatatggtgttgtgcgactaattgcgcacaaatttgccgggtaatatgttgccagctttcaccgcgtacattgctataatgaaaacttccgggggcagagaaaaaacgctccggctgttggcgaataaatgccgtcgccagaaaatgttttatttgttcgataccggcagccgtaatgatattttttacggtgatgtaattatttaccgcgtcatccagtaaataatggctgttgttaatgatcaataacggctcaatctcttcgcgaatggcaacaagttcgcttaagctacgggcaataattacccgacaatttaaaacatcgcgctcaatggcgagctgattaatagtggcaatcgcgttctggtcgctgagcaaaatgatcggctggcgttcgttttgatgccgctccagcgcacaggcaaaatacaaaccgatcagatcgctgtcgaaaaggggaatatcgagctgttcacgcagtagcgtaataaagtgcagactcatatcaaaggccgcaggccaggcggctttcaggttattcatgctgctctggcggtgctcagcaatccacactggtgcggcaaggcaacgtaataaatgcccggtaatattctcaaccagctgcgcatcaataatattcaaactcgcgatgcccggcaccctttgcagcaacccctgcacattatcggcactaattacctgcgcttgctgatgctgtttctctatcaaacccgtcagggttcttacagcgttatcaccaagaaacagaccgctatgttcaacgatttgttttatctcgtcaccgggatattgcggccactcatcggtcagttgattacgcagggcgtaaatcgccagaatcaggctggagagataatcaccctgcatgagcggccagcggtgttggttgtcgcaggccgtggataaatgctgaaggttgtctcgtgttatgcccgccagcggaattaaaaacggatctttgcgcagcaagttcgccagcaagataacgcgtttctcttctgtctcatcaatgaaatggcccaaaccagggcggctggccaggcaacaagtgcgttcataacgctgttttaaccggggcagacgctctgctacccacgtttctggcaaattaagcgcgctggcgagttgcgcacggggagtgaaagtattcagtaataacagcgccagcagccgatcgtcgttatcgtgcttttgcagcaactgaaaaaagctgcggcgctcgaagatttccagctgatagcccgcactgccactggcgaaaatgcgggctttgccgttaagggtgaagttgagatagtcaatatcacgcaggatggtcctgccactaacgccagtctgttgcgccagctcgccaggcgtgcgcggctgttgctccagcagatcgacaatctttaactggcgttcgtttagcattaatccacctgacggaactggctaaacgcgttgactttctccgcagttaaggtcgtcagaaaaccccgtatcagcgtgagcagagcttcgtaatcggctttactaatcataccgctgttggcgtgcagataacgagttggcagacacagcgcgacaaccggacgcccgccgcccatcacgttgtagcgcccgccatccgtcgcaccggttttcatggtggaaaattgcagcggtaaatcgttatgtgcggcacagctttttaacgctgctaccagtttctggttggggaagtagcgcttgtcaaacagcatcagccccggcccctggcccagtttcagcgggtatttaatgttatcaatgcccggaacatcgcccgctacggcggtatccaacacgatcacgacgtccggtttaatgtgttccgcgctggtttgcgccccgcgtagcccaacttcttcttccacactgccaacgccatacagcgtaatttcgggattattcaccgtctgcaatagttcagccatcattgcgcagccgatgcggttatccaacgccttgccgaccactttatcttcgccccagcaggcaaaattggcttccgggctaataaaattaccaatttccacgccgcgcttttccacctcttcgcgactgttcgcgccaatatcaatgaacatctcatcaaaactcagcggttgttgcttttgcttttccgttaacgcatgaggcgcgacggaaccaatcacaccagggattttcactcccttgtgtgtgcgtatggttacccggtggttgagcatgctctgattccaccagccgccaatggtggtaaaacgcagaaaaccgctctcgtcgatgtgggtgaccataaagccgacttcatccatatgtccgacaacggcaacttttggacctttattccccttacgggcaacaaagctgcccagaccatcgaaggtgatttcattcacgcaaggttccagcgtgtttatcagaatgtcgcgaacttcctgttcatcgccgctgacggcgctggcttcgcacaactgttgcagtaactcaatgttcatggacaagctcctgttgcgcggctttcgctttgcggcgtaaccacaatcctttcaggacgataatgaaactaatgttcagcgcgaggccaatcgccagcaccagataaaagctacccaccgggctcatcaggccgatcagcgggtcaaagatacccaaaccaggtgccagacgtttgattccgaaagcgatcaccagcacgccggtaatgccgcccgccagcgtattggcggtaatcatcggcaacggagctgccagagcgtaaggaatagccggttcggttgcgactgtggcaccgaccacaatggcactactggcagcctctttttcctgtcgggtaaacagtttgggcgcaatgaacgtcgcaagacccgccgcgacgggcggcatcagcgcgacaacgccgacgatggcgtaccagtcataaatgtgtttttccagcagactgaagcagaagaaccaggcggttttattgatggggccgcccatatcgaacgccagcatcgcaccgaccagaaacgctgccgcaaacttcatacttggaggaatggtattcaggaagtggagcagcccgcccatgaggtcggacatcaccggcccgataacgtagtaagtgagcacgccgaaaaccagcagagtaacgaacgggatcagcatactaccgagcagcggttgtaatgctttgccaaggcgcactttgcggaaccagaagacgaaatagccaatcgccagccccagcaccaccgcgccgaggaatcccgcaccgctctgggtgccgagcagcgctttgtcgttcgccagatagcaaaccagaaacgccggagcgaaagccggtttatcggcaatgctgctggcaatataagcgcccatgatggggatcataaaggtgaagccaaggtaaccgatggattcaactacccaggtaaagctcggcgcgcctttgctcatatcggtatacggcaaaccgaactgcaccagcatgttggcaagcgccaccaggataccaccgccgatgacaaacggcagcgccgcagagacgcccgccatcaggtggctcatcacgctaccgctttgcacttcctgtttgccaagcttcacgccgctatctgcggcaaaaagctggctgtttgtcggtaattcgctgaaaatctggtcgatatttttcaacgcctgggagatggcaatctcataaactttcttcccggcaaaccgcgcgcgatcatcaccgctcaggccacgcccggtagcgagaatgacgtaatcggcagcggcaatctcttcgctggataagcggttttcaacgccactggacccttgagtttccacttttatggtatgaccgagagaacgggctttctgttccagggcttccgccaccatgtaggtgtgagcgatcccggcggggcagttggtgatcgcgacaatacgtaaggaactctccatcgccacttccttaactgctgagggtttgatttaacaaggcaagcacctggtcggtatcgccctgttgcagttgatgaataaattccttgtgaataattttgcgacacagtgtgccgatgattttgacctgatcctcttcgccgctttgcggcacgccgaggcagatccagcaattgacgtcttcgccatcgctggctttccagtcaatagcctgcgctttgcgggcgaataatacgaacggttgtttaacgcaggcgcttttaccgtgcggcacggcgacaccggaaccaaatccagtagagtgcattttttcgcgcagcagcagggtttgcaggaactggtgactgtcggtgataaaaccgttttgtaacgctattgtcgccaactgcttcagaacggaataagcgccattgccctgaatattcaggtcaatacagcttgcagtaagagctgccattaatcggactccataaaatatattttaatcaattgtaatggtggagcgattaagtgatgagaggcgatatgtcggtaaacaatgacaatttgagacagagtgaaaggtcagatttgcggagtaatgcacataatggttatttaaataaaccacatgaatcattaatgggttattcattatttttgtgatttactcacaatgtatcagggaaatataacttaccgggagatgtaatatgtttaatttttcaaatcgaaatttaaaatattgtgccggaggcatctctggcacattgggcaattacggcaggtaaaacacttcttgcagctcgctactcaccgggctgttatccgggttagcgggcataacatcggtcatatatttccaccaacgttggcagacatcagtgctggcaaccgcattccagcgttcttcagattcaatctctaccatggcaaacagcagattacgcgctttgtcgagatagatggcgtagttatgcgcaccgtgagatttcagcactgcttccagttctggccagatgggattatgccgacgctgatactcttcgtgggcgtcggggtttacctgcatgacaaaggctttgcggatcatgtttgctccttacagcgccagcgcactggcgagtggcgtaacgccgaaacgcttgccgagcgctatcaactcttcacggctgatggtctgtttcatgccgcccatgctataaaccttcactaatacttgtgcacttttttctgcggtgtcgattaaaccgaaggtttcatccagcgtcggtccgctgccgaagacgccgtggaagggccacaacaccaggctatgtttttgcatctcttgtgcggtcgcctggccgatttcgtccgtgccgggcaccatccacggcaaaatgccaacgccatccgggaataccaccagacactcggtgctgccttcccacagttggcgagtgaagaccgcggtgtcgttttcaagtacataggtgagggcgatcaggttggtggcgtggcagtgcatgatcacccgatctttgccgttggtggctttaatgcgctcgcagtgggaaaggaagtgagccggaagttcggaagtggggacggcttcgttggttaacccccaaagaatgtggtagcccgcgccgtcgctgtcgacttttacgatgcctaagttagccgcaggatcaagctggacgttacggaagaatttgccgctgccggtgacaataaacggtgtatttgccagtaaaggcatgggctggctgagcgggatatagcgcggttgttggtggaaattgtcgtgatatggtgcgatatcggcgtcatccaggcgtagcgtcaggttgccgccgttgcgctcatcccagcctttcagccaggcgtcggtggtggctttgatcattccctggacaaaccaggactgagtaatgttttgcatgttctgtgttcctgtaaattcggtgttgtcggatgcacgacccgtaggccggataaggcgctcgcgccgcatccggcaatcaatgcctgatgcgacgctgtcgcgtcttatcaggcctacaactattgccgacctgtaggcctgataaggcacttgtgccgcatccggcaatcaatgcctgatgcgacgctgtcgcgtcttatcaggcctacaactgttgccgacctgtaggccggataaggcacttgtgccgcatccggcaatcaatgcctgatgcgacgctgtcgcgtcttatcaggcctacaactattgccgacctgtaggccggataaggcacttgtgccgcatccggcaatcaatgcctgatgcgacgctgtcgcgtcttatcaggcctacaactgttgccgacccgtaggccggataaggcgctcgcgccgcatccggcagtgtttacccgcggcgactcaaaatttctttctcataagcccgcacgctctccagccattcgctacctgctggcgtatcgtgacgttggcaatacatttcccagaccgcctgccacggcaagcttttctgctcttccagcagtgccagacgcgcagtgtaatcgcccgccgcttccagcttgcgcagctcagcggtaggttccagcaacgcacgcagcagggcttttttcatattgcgtgtaccaatgacccacgcggcaatgcggttgatagaggcatcgaagaagtcaaggccgatatgcacccggtcaaacagatcgtgacgcacaatctcactggcaattgcctgggtttcatcatccagcagcactacgtgatcgctgtcccagcgaaccggacggctgacgtgcagcagcaactgcggcacatacagcatggcggcggaaatcttgtcggaaatcacttcagtcgggtggaagtgcccggcgtccaggcacagcgcagtctggcggctggtggcataccccatgtaaaactcattggagccaaccgtgtagctctctgcgccaatgccaaacaatttgctctcaacggcgtcgatatggtgcgcagggtttagcttctcgctgatcacctcatccagtgctgccagcagacgctgacgcggggcgagacggtcaacggtgatatctttcataccatccgggatccagatgttcatcacgcttggtgtgccgagttgctcgccaaaataggcgctaacgcgacggctggctttgcagtgatcaatccagaactggcgaatgctgtcgtcggcatgggaaagcgtaaagccatcggcgcttagcggatggctaaagcaggaggggttaaaatccagaccgagctgattggctttcgcccattcaacccagtttttgaagtgctctggtttgatctggtcgcggctgactggcgtatcactttccagatagatggcatgtaaattaagccgtttcggccccggaatcagccgcatagcctgttccagatcggcacgtagctcactggcattacgcgctttgcccggataattgcctgtggcctgaatccccccggtcaggctaccttccgggttttcaaaaccggaaacatcatcgccctgccagcagtgcatactaacgggtaaacgatcaagttggcgcagcgcctcctcgacatcaatccccaccgccgcgaaacgctgtttcgctagctcccaggcctgttccagttgagtggtcatgcgcaaagctcctttgtctgtcgtgtagagtgaatctgcgccacatagtgggcaatttcactgtcaggattaggggtaaaggtggtcagattcgcggtggtgctgacgacctgacggaaatcatccacattgttgagttcatccagcgtcattaactggatgccgatattgccgagcgtgctggcttcaacaggcccggcgatcacccgaataccgcaggcatcggcgcatagctggttgagcagcgtgttctggcagcctccgccgacaatatgcagttggctgaaatcttcaccgcgcagctgcgccagctcatgcaacacatcggcatacagcagcgccagactgtcgaaaatgcagcgcgccagttcagcatcactttccgggatcggttgcgccgtttcccgacacgcagcctgaatttcgctgcacatcgtctcaggattaataaagcgatcgtcattgggattgataatgaagcggcaagccggaagtgcctgtgtcgcggagataagcgccggaagatcgttgatttgctgctcctgaagcactcgctgaagcagccataagcccataatatttttcagcacccgatagcgaccttccgccccgccttcattggtgatgttggctgccagtgccgtgtcattggtaaatggcgtctggctttcgaagcccatcaaactccaggtgccagaagagagataagcagcacgactgccgtttaacgggctggcgataaccgcgctggcggtatcatggctggcaacggcgaccactggaatctcattaccctgcgggcaaatccagtgacctatgacattacccggatgcgtcgggcgaccaaaccaggctttgttggccccgctccacgccagtaggctctcgtcccagtcgtcgctattgatattgaccagttgcgtggtcgtggcgttggtatattcccagttcatcttgccggtcaggcgataactgaagtaatccggcatcagcagagcgtgagcaatgtgtggaataagttcaggttgttgctccgtcagcgcacgcaactgataaagcgtattgaagggcagaaactggatgccgctacgttgataaatatcgcgtttgccgagttgttgttgtgcctgcgccattaggccattggtgcggctatcgcgataagcaacgggcaggcccacacgctgaccctgttggtcgagcagcacaaagtccacgccccaggtatcaatcccaatgctatcgatacgaatcccttcctcgcacaccttgtttaatccaaggcgaatggcactttcaaggctatccacatcccaggtgacatagccgttctgactatgcagcccattgttaaaacgatggatttcgcgcagcgtcaggctgcggcattcacgctcgtaacgcgccagcatcacgcgcccactggatgcgccgagatcgacggcgacacaattgcgaaaggtcataatgtgatcctgctgaatttcattacgaccagtctaaaaagcgcctgaattcgcgaccttctcgttactgacaggaaaatgggccattggcaaccagggaaagatgaacgtgatgatgttcacaatttgctgaattgtggtgatgtgatgctcaccgcatttcctgaaaattcacgctgtatcttgaaaaatcgacgttttttacgtggttttccgtcgaaaatttaaggtaagaacctgacctcgtgattactatttcgccgtgttgacgacatcaggaggccagtatgaccgtattacatagtgtggatttttttccgtctggtaacgcgtccgtggcgatagaaccccggctcccgcaggcggattttcctgaacatcatcatgattttcatgaaattgtgattgtcgaacatggcacgggtattcatgtgtttaatgggcagccctataccatcaccggtggcacggtctgtttcgtacgcgatcatgatcggcatctgtatgaacataccgataatctgtgtctgaccaatgtgctgtatcgcagcccggatcgatttcagtttctcgccgggctgaatcagttgctgccacaagagctggatgggcagtatccgtctcactggcgcgttaaccacagcgtattgcagcaggtgcgacagctggttgcacagatggaacagcaggaaggggaaaatgatttacccagcaccgccagtcgcgagatcttgtttatgcaattactgctcttgctgcgtaaaagcagtttgcaggagaacctggaaaacagcgcaagtcgtctcaacttgcttctggcctggctggaggaccattttgccgatgaggtgaattgggatgccgtggcggatcaattttctcttagtctgcgtacgctacatcggcagcttaagcagcaaacgggactgacgcctcagcgatacctgaaccgcctgcgactgatgaaagcccgacatctgctacgccacagcgaggccagcgttactgacatcgcctatcgctgtggattcagcgacagtaaccactttagcacgctttttcgccgagagtttaactggagtccgcgtgatattcgccagggacgggatggctttctgcaataacgcgaatcttctcaacgtatttgtacgccatattgcgaataatcaacttcgttctctggccgaggtagccacggtggcgcatcagttaaaacttctcaaagatgatttttttgccagcgaccagcaggcagtcgctgtggctgaccgttatccgcaagatgtctttgctgaacatacacatgatttttgtgagctggtgattgtctggcgcggtaatggcctgcatgtactcaacgatcgcccttatcgcattacccgtggcgatctcttttacattcatgctgacgataaacactcctacgcttccgttaacgatctggttttgcagaatattatttattgcccggagcgtctgaagctgaatcttgactggcagggggcgattccgggatttaacgccagcgcagggcaaccacactggcgcttaggtagcatggggatggcgcaggcgcggcaggttatcggtcagcttgagcatgaaagtagtcagcatgtgccgtttgctaacgaaatggctgagttgctgttcgggcagttggtgatgttgctgaatcgccatcgttacaccagtgatagcttgccgccaacatccagcgaaacgttgctggataagctgattacccggctggcggctagcctgaaaagtccctttgcgctggataaattttgtgatgaggcaagctgcagtgagcgcgttttgcgtcagcaatttcgccagcagactggaatgaccatcaatcaatatctgcgacaggtcagagtgtgtcatgcgcaatatcttctccagcatagccgcctgttaatcagtgatattagcaccgaatgtggctttgaagatagtaactattttagcgtggtgtttacccgggaaaccgggatgacgcccagccagtggcgtcatctcaatagccagaaagattaattcgccatgccgatgccgacgatgttagcggcgacaataatcaccacacaaccgaggctcaacaccgttaccggacggcgtcctgcattgttccactctttcagcaccagcccgacgataccgccgcacaatacatagaaactcatatgcagcatccaactgatgtagtcatactgcgccggaatgcgggcgtggccccaggcatagaaaaagaattgcagataccacatcaacccgcccagtgtgctgagtaacacattgtgaatgatcaggctttttgccaggctgaagtcggcttttaggctcaaatccttcacttttgccagacgaataaaacagaaaccgaggttaatgatcgcgccgccgcccatgatgacaacatagcttggcagagcgacatacagtggatcgacgccaagtgcggcagcggcttcatgcatcggttttgcggcgttcatcgcaaaggacatcccggcagagaaaatgccgcacatcaccgccagcaccagcccttttttcagattgaactcttcggctttaatgcccatcttgcgctctttcaactgcccggcgcgagttacaatccctacgccaatcagcgccaccagaacgccgagcaacgtcatgcgtccgccttcggtgctaatcaacacatcgaaattgccgttgataattggcgtcatcagcgtaccgacaatcaacgtaatgccaatggcgatgccaattcccatgctcatgccgagataacgcatggtcaggccgtagttgatattaccgatcccccacatagcgccgaacagaaaaacaggcagtcgcgtagagagactaaagctgctgtaatacgcccagaaattcggtagtaacagggcgctgatggcccacggcagaataatccagctaacaatcccaccgacactccacatggtttcccaactccatttttttacttttttgaacggagcgtaaaaacaggctgcactggccgcgccgatcaaatgccaaaatatccccatcgtaatcgcgttactcatcttcttatcctcatcatttttcgtcgcgtcacatctccgacgagatgagtgtaaaaatcgtgctgtcgattaacctttcgcctgttgccgccgttgtcgatttactggcaatcacggcattaagtgggtgatttgcttcacatctcgggcattttcctgcaaaaccatacccttacgaaaagtacggcattgataatcattttcaatatcatttaattaactataatgaaccaactgcttacgcggcattaacaatcggccgcccgacaatactggagatgaatatgagctataccctgccatccctgccgtatgcttacgatgccctggaaccgcacttcgataagcagaccatggaaatccaccacaccaaacaccatcagacctacgtaaacaacgccaacgcggcgctggaaagcctgccagaatttgccaacctgccggttgaagagctgatcaccaaactggaccagctgccagcagacaagaaaaccgtactgcgcaacaacgctggcggtcacgctaaccacagcctgttctggaaaggtctgaaaaaaggcaccaccctgcagggtgacctgaaagcggctatcgaacgtgacttcggctccgttgataacttcaaagcagaatttgaaaaagcggcagcttcccgctttggttccggctgggcatggctggtgctgaaaggcgataaactggcggtggtttctactgctaaccaggattctccgctgatgggtgaagctatttctggcgcttccggcttcccgattatgggcctggatgtgtgggaacatgcttactacctgaaattccagaaccgccgtccggactacattaaagagttctggaacgtggtgaactgggacgaagcagcggcacgttttgcggcgaaaaaataatcatttgccgcctgctgcaatgaggcgtataggccgcatatcagcttaaaaaatgaaccatcgccaacggcggtggtttttttgtgatcaatttcaaaataaaaacaatgatccgataaaaataaaacagcgtttcaattgatgtggttttgatcacttttattgattaaatgaatgtctatcttcgtttccatcaacactgatgctccattgaggaattacgcatcagcccttaaaaatatgccgacaggtgatggaaatgcagataaaacgcagcattgagaaaatcccgggggggatgatgctcgtcccgctattccttggcgcactgtgccacaccttcagcccgggggcggggaaatattttggaagtttcaccaacgggatgattaccggtacggtgcccattctggcggtgtggtttttttgcatgggggcgagtataaaattaagcgcgacgggaacggtactgcgtaaatccggtacgctggtggtaactaaaattgccgtcgcgtgggtggttgcggcaattgccagccgtattattccggaacatggtgttgaagttggattctttgccggacttagtacgctggcgctggtggcggcgatggatatgaccaatggcggactttacgcttccatcatgcagcagtacggcacaaaagaagaagctggggcatttgtgttgatgagcttggagtccgggccgctcatgacgatgattattctgggcactgccgggattgccagctttgaaccgcatgttttcgtcggcgcagtattaccgttcctggtgggctttgccctggggaaccttgaccctgaattgcgagaatttttcagcaaagcggtgcaaacgctgattccattctttgccttcgcgctgggcaataccattgatttgactgtgattgcccagactggtttgctggggatcctgttgggtgtggcagtaattatcgtgaccggtattccgttgattatcgccgataaattgattggcggtggcgatggcactgccggaattgccgcttccagttccgcaggggccgcggtagcgacacctgtgctgattgcagaaatggtgcctgcgtttaaaccgatggctccggcagcaactagcctggtagcgacggcggtcattgtgactagcattctggtgccaattcttacctctatctggagtcgtaaagtcaaagccagagcagcgaaaatcgaaattttaggtacggtgaaataaacctgcttccttaatccccacagccggatgaactaacgttcgtccggtttgctattgagttcctgcctggatacttaccgcgaaaacagcacgcctgacataaaataaatatggtctaatggggaaatttctcgtggagagggaacagatgcgatatccggttgatgtatacacaggcaagattcaggcttatcccgaaggcaaacccagcgcaattgctaaaatccaggttgatggtgagttgatgctgacggagctggggctggaaggtgacgagcaggcggagaaaaaggttcacggcgggccagacagagcgctgtgtcattatcctcgtgagcattatctctactgggcgcgggaatttccggaacaggcggagttgtttgttgcgcctgcgtttggtgaaaacctcagtaccgacggcctgacggaaagtaatgtttatatgggcgatattttccgctggggagaggcattaattcaggtcagccagccgcgcagcccttgctataaactcaattaccattttgatatcagcgatatagcgcagttgatgcaaaacacaggtaaggtggggtggttgtatagcgtgatagcgccagggaaagtgtctgcggacgcgccgctggagttggtttcccgtgtcagcgatgtgaccgtgcaggaggctgccgccatcgcatggcatatgccgtttgatgacgatcaatatcaccgtttactctccgctgccgggttaagcaaaagctggacgcggacgatgcaaaagcgccgactgagcggcaagatcgaagatttttcccgccggttgtggggaaaataacccccggagtgtaggcctgataagacgctatcagcgtcgcatcaggcatcctgctcaaatgccggatgcggcgtaaacgccttatcctgcctgcaaatgcgaagtttaactccgcttatacagcggcaaccaaatcaccagccgtaaaccgcccagcgggctgtcttctgccttcacccagccacgatgctgctgaatggcggtttcaacaatcgccagccccaaacctgtaccgccagattcacgatcgcgtgcttcatcggtacgatagaacggacggaaaatctgttcgcgatcttccgggctaacgccaggaccatcgtcgtccaccgtaatggtgataccgtctttatctaccgcaaagcccacttcaatcttcgtatgggaataacgcagagcattacgaacaatgttttccagcgcactttccagggcgttcggattgccgtacagcggccacggcccaggcgggaagttaactgtcaagctcttgcccatttgctcggcttcgaacgccgcgttatccagcacttcactccacaactggttggctttgatggtttcgctaaccagcgcgtttttttgctgattacgactcatcaccaacagatcgttgatcatgctgtccagacgttgcgcttcggtttcaatacgctccagttccttgctttcaccgctacgacggcgcagtaacgccgtacccagttgcagacgcgtcagcggggtgcgcagctcgtgagagatatcagaaagcagacgctgctgagaggtcatcatgcgctccagcgcggtgaccatctggttaaaactggcacctgcggcaaggaattcctgtggccccgcttccagttccgggtgctggcgtaagtttccctgggcaacttcatcggcagcgtttttcagcttacgcgccggttttgccagactccaggccaaccacaacagcagcggcgtactgaccaacatggtgacaatcagcagtaatagcgggcggtcaaacagtaagttaatgaaatcggattgagaactgctggccggacgaatcagataaagttggtaattatcttcgccatcacgcacggagaacggaccgaccagttccacgcggccatactttttcttctgcggatgatcggcgttatcggcctgaccaataaagttacgaatgatctgcatttcgctgcgttcagcgccgatcacgcggccttcggtggtcaccaataacaaacgctgtcctggcggtgcccacttatcaatcgcccggaacagacgccgccaccacattaaatcgttgggcggatcgttcgccagctccgcttcgacatgctgctcaatcatcagcccctgacgctgttcgctatccagaagctcggtcatctggcgactatcgagcttgggtaacatcaaaaccaacatcaacaccagcgccagcgtcagccagaagatggcgaagatgcgcgcggttaagctgcctatcatgaagcagaaaccatcagatattagctcaactagcagaaaccatcagatagccgcgaccacgcaaggttttaaaccacgggtgaccatctttacgatccggcagtttacgacgcaggttggaaatgtgcatatcaatagcgcggtcgaaaggcgtcaggcgtttgcccaacacttcctggcttaaatgttcacgggaaaccacctgacccagatgctgtgccagcaaatagagcagggtaaactcagtaccggttaactccagcgtttgcccgtcgaagctggcttcctgacggcctggattcagcactaaggcatcaacttccagtgtcggactaccgttgtcgttgttttgctgttgctcgctccagtggctacggcgcaggatcgcgcgaatacgtgccaccagctcacgatcattaaacggtttcgggagatagtcatctgcgcccagctcaaggccgagaacgcgatcaagttcactgccgcgcgccgtcaacataatgacaggcgtctggtgtgtctggcgaagtgcttttaatgtgtcgataccatttttcttcggcatcattacgtcaagcaaaagtaaatcaatgctgtcgtccagaagatcaagcgcctgttccccatcgtgggcaacaatcacgttgaagccttccatctcgagcagctcctttaatagggaagtcagctctcggtcatcatcaactaacaggattttattcattgtttaaatacctccgaggcagaaattacgtcatcagacgtcgctaatccatgactttacgttgttttacaccccctgacgcatgtttgcagcctgaatcgtaaactctctatcgttgaatcgcgacagaaagattttgggagcaaatgatgcgcatagttaccgctgccgtcatggccagtacgctggcagtcagtagtttaagccacgctgctgaagtcggtagtggcgataactggcatccgggtgaagaacttacgcagcgcagtacgcagagccatatgttcgacggcataagtttaaccgaacatcagcgtcagcagatgcgagatcttatgcaacaggcccggcacgaacagcctcctgttaatgttagcgaactggagacaatgcatcgccttgtcaccgcagaaaattttgatgaaaacgctgtgcgcgcacaggcagaaaaaatggcgaatgagcaaattgctcgtcaggttgagatggcaaaagtccgcaaccaaatgtatcgcctgttaacgccggagcagcaagcggttttaaacgagaaacatcaacaacgaatggagcagttgcgtgacgtgacgcaatggcaaaaaagtagtagcttgaagctattgagtagtagcaacagtcgttcccagtaataaaccctgttttccttgccatagacaccatccctgtcttcccccacatgctgtgggggttttttttatcctcaatttgcctgctgcttaatgcattgcagatgatttgcttccgttatactagcgtcagttgatagcgggagtatttatgaatcaatcttatggacggctggtcagtcgggcggcgattgctgcgacggcgatggctagcctgctattgctgattaaaatttttgcatggtggtataccgggagcgtgagtattctcgccgcgctggtggatagcctggtggatatcggcgcgagcttgacgaatttattggtggtgcgatattccctgcaacctgccgacgataatcacagctttggtcacggtaaagctgagtccctcgcggcgctggcgcaaagtatgtttatctccggtagcgcactattcctgtttttgacgggtattcaacatctgatatctccaacaccgatgacagatccaggcgtcggggttatcgtgacaattgtggcgctaatttgtacgattatccttgtcagctttcagcgttgggtggtgcggcggacgcaaagccaggcggtgcgggctgatatgctacattaccagtctgatgttatgatgaacggcgcaattctgctggcgctggggttgtcctggtacggctggcatcgcgccgatgctctgtttgcattgggaatcggcatctatattttatatagcgcgttacgcatgggatatgaggcggtacagagtttactggatcgcgcattgcctgatgaggaacggcaagaaattattgatatcgtgacttcctggccgggtgttagcggcgctcacgatcttcgcacgcggcagagtgggccgacccgctttattcagattcatttggaaatggaagactctctgcctttggttcaggcacatatggtggcggatcaggtagagcaggctattttacggcgttttccgggaagcgatgtaattatccatcaggacccctgttccgtcgtacccagggagggtaaacggtctatgcttagttaatcagtataaaagagagccagacccgcattttgtgtataaaataccgccatttggcctgacctgaatcaattcagcaggaagtgattgttatactatttgcacattcgttggatcacttcgatgtgcaagaagacttccggcaacagatttcattttgcattccaaagttcagaggtagtcatgattaagaaaatcggtgtgttgacaagcggcggtgatgcgccaggcatgaacgccgcaattcgcggggttgttcgttctgcgctgacagaaggtctggaagtaatgggtatttatgacggctatctgggtctgtatgaagaccgtatggtacagctagaccgttacagcgtgtctgacatgatcaaccgtggcggtacgttcctcggttctgcgcgtttcccggaattccgcgacgagaacatccgcgccgtggctatcgaaaacctgaaaaaacgtggtatcgacgcgctggtggttatcggcggtgacggttcctacatgggtgcaatgcgtctgaccgaaatgggcttcccgtgcatcggtctgccgggcactatcgacaacgacatcaaaggcactgactacactatcggtttcttcactgcgctgagcaccgttgtagaagcgatcgaccgtctgcgtgacacctcttcttctcaccagcgtatttccgtggtggaagtgatgggccgttattgtggagatctgacgttggctgcggccattgccggtggctgtgaattcgttgtggttccggaagttgaattcagccgtgaagacctggtaaacgaaatcaaagcgggtatcgcgaaaggtaaaaaacacgcgatcgtggcgattaccgaacatatgtgtgatgttgacgaactggcgcatttcatcgagaaagaaaccggtcgtgaaacccgcgcaactgtgctgggccacatccagcgcggtggttctccggtgccttacgaccgtattctggcttcccgtatgggcgcttacgctatcgatctgctgctggcaggttacggcggtcgttgtgtaggtatccagaacgaacagctggttcaccacgacatcatcgacgctatcgaaaacatgaagcgtccgttcaaaggtgactggctggactgcgcgaaaaaactgtattaatgatttcggaaaaaggcagattcctttaccctgaaaccgatgacagaagcaaaaatgcctgatgcgcttcgcttatcaggcctacatgaattctgcaatttattgaatttgcaaacttttgtaggccggataaggcgttcgcgccgcatccggcatggacaaagcgcactttgtcagcaatatgaggcggatttcttccgcctttttaatccctcaacatatacccgcaagttatagccaatctttttttattctttaatgtttggttaaccttctggcacgctttgctcatcacaacacaacataagagagtcgggcgatgaacaagtggggcgtagggttaacatttttgctggcggcaaccagcgttatggcaaaggatattcagcttcttaacgttagttatgatccaacgcgcgaattgtacgaacagtacaacaaggcattcagcgcccactggaaacagcaaactggtgataacgtggtgattcgtcagagtcacggtggcagtggtaaacaagcgacgagcgtaatcaacggtattgaagctgatgttgtcacgctggctctggcctatgacgtggacgcaattgcggaacgcgggcggattgataaagagtggatcaaacgtctgccggataactccgcaccgtacacttccaccattgttttcctggtacgtaagggaaatccgaagcagatccatgactggaacgatctgattaaaccgggtgttagcgtgatcacgcctaatccgaaaagctctggtggcgcgcgctggaactacctggcagcctggggctacgcgctgcatcacaacaacaacgatcaggcaaaagcacaggattttgttcgggcactgtataaaaacgtcgaagttctggattctggcgcgcgtggctccactaacacttttgtcgagcgcggaattggcgatgtactgattgcctgggaaaacgaagctctgctggcagcgaatgaactggggaaagataaattcgaaatcgtcacgccgagtgagtctatcctcgcagagccaaccgtgagcgtggtcgataaagtggtcgagaaaaaaggtactaaagaggtggcggaagcctacctgaaatatctctacagcccagaaggtcaggaaattgccgcgaaaaactactaccgtccgcgcgacgctgaggtggcgaaaaagtacgaaaatgcgtttccaaagctgaagttattcaccattgatgaagagttcggcggctggacgaaagcgcaaaaagagcattttgctaacggcggtacgttcgatcagatcagcaaacgctgatttccccaggataattatcaaacccggtggtttctcgcgaccgggttttttatttgtcacgattttgcgttacccttgcatctctttgaggtacagggaaaaaaagatgaaaaaagcgggtcttctttttttggtgatgatagttatcgccgttgtggctgccggtattggttactggaaattaaccggtgaagagagcgatacattacgtaagattgtccttgaggaatgtttgcccaatcagcagcaaaatcaaaatcctagcccatgtgcggaagtcaaacccaatgccggatacgtggttttaaaagatcttaatggcccactgcaatatctgttgatgccaacgtatcgtattaacggtactgaaagtcctttgttgaccgatcctagtacgccgaacttcttttggttggcttggcaggcgcgtgattttatgagcaaaaaatacggccagccggttcccgatcgcgcggtttctttggcgatcaactcccgcaccgggcgtacgcaaaaccattttcatattcatatctcttgtattcgtcctgatgtgcgcaaacagctggataacaatctggcgaacatcagcagccgctggttgccactgccaggtggtttgcgcgggcatgaatacctggcgcgtcgggtaacggaaagcgaactggtacaacgcagcccatttatgatgctggcagaagaagtacctgaggcgcgggaacatatgggacgctacgggctggcgatggtacggcagagtgataacagttttgtattgctggcgacacaacgaaatctactgacgcttaaccgtgctagtgccgaggaaattcaggatcatcagtgtgagattttgcgttaaggcgaagagttaaggaaagtaagtgccggatatgaaatccggcacctgtcagacttaagcctgtttagccgcttctgcagctttaacgattactgcgaaggcgtcagctttcagagaagcaccaccaaccagcgcgccgtcgatatccggctgagcaaacagttctgcagcgttagacgcgtttacagagccgccgtactgaatgatcacttgttcagcgatgttagcgtcaactttagcgatgtggtcacggatgaatttgtgaacagcctgtgcctgagccggagttgcagatttgccagtaccgattgcccatacaggttcgtaagcgataaccgcaccttcgaatgccgcagcaccctgagttttcagtaccgcgtcgatctgacgtgcgcaaacttcttcagttttgcccgcttcattttcagcttcggtttcaccgatgcacagaaccggagtcaggccctgctctttcagcaccgcgaattttttcgcgatcagttcgtcagattctttgtggtaagtacgacgttcagagtgaccgatgatgatgtactgtgcgccgatgtctttcagcatagcagcagaggtttcaccggtgaatgcgccggacaggttcaggtccacgttttgcgcacccagcatgatgtggctgccttcagcttcgcgcttcgccatatcgatatacatttccggtggtgcgattgcaaccgcacagccagcaacacctgccagctctttacgcaggttagaaaccagctcgtgaaccatgtggcggctgccgttcagtttccagttacccatcactaaaggatgtcgcattttaattctccacgcttataagcgaataaaggaagatggccgccccgcagggcagcaggtctgtgaaacagtatagagattcatcggcacaaaggctttgctttttgtcatttattcaaaccttcaaggctttcagatagcgccagcttaatcggttcaacagcgaaggtcagccccttttcgccgttgtccgcgacaacataacgcagtgcaccttctgtctcggtgtaataacgtttgtttttccccgccgttagtaggctctgcagttttttctggctttgtgttttggtcattaatggggtgagtgtgcggatcaccgctgccatgtattcctgagctttcgctttcgcggctttttgctctggcccctggatgggtagccaggtcatttgaatgcttttgatttttaaggtaccgcgctccagcgctgtagaagcatacaagttctcattaattttacttgcagcacgagtgagattggctttgtcgggactgctgtcgatggcacgaaattcgttcagtggcaggctgggattctggctgttaaagtcttctcgaaactggctgatggagagatcgaaagtaggggctccagccagcagataaggcgcggtcgttgccgtatctggtgtttgtgcatgcgcctctgttgtaacggttaatgcagaacataagagaaaaaacagcgtacaccctggcttcattgacagtaccttttgttatgactggctccgattaaaacgatatctgtcgcccttgtcaaaagggtagaatcctggaaaagacaaccatcaaggaacttacatgaccatacagcaatggttattcagttttaaagggcgtattggacgccgtgatttctggatttggataggcctgtggttcgcaggcatgctggtgcttttcagtctggcgggtaagaatctactcgatattcagaccgcggcgttttgccttgtgtgcttgctctggccaacagcggcagtaactgttaagcgcttgcatgatcgcgggcgttccggcgcatgggcatttctgatgattgtggcgtggatgctgctggcgggtaactgggcgattttaccgggtgtctggcaatgggcggtggggcgttttgtcccgacgttgattctggtgatgatgcttatcgatcttggtgcgtttgttggcacacaaggcgaaaataaatatggtaaagatactcaggatgtgaagtataaagccgacaataaaagtagtaattaacctttaatatatctcttactgctatttttttccgggattgttatttccacgatgcaaatgacaatacccggaaaatccttctgaactcttcaccttaagcaatatcaaaaaaaatggtaatccataagatcattacttgtttgttcttcccttaacggcgcattattcttaagtcgtaatcgacagagaggcgaatatacagaggtgccctatgaaagatgtcgtagataaatgcagtactaaaggatgtgcgattgatatcggtacggtgattgataacgacaactgtaccagtaagtttagccgcttttttgccacccgcgaagaagcagagtcttttatgaccaaactgaaagagcttgccgccgctacatcctctgcagatgaaggggccagcgtggcctataagattaaggatctggaggggcaagttgagcttgatgcggccttcactttcagttgccaggccgagatgattatttttgagttaagtctgcgtagcttagcttgatggagttgctttagaaggagttaaacatggcttataaacacattggcgtggcaatttccgggaatgaagaagatgccttactggtgaataaagccctggagctcgccagacataatgacgctcacctgacgttaattcatattgatgatggcttaagcgagttgtatccgggtatctacttccctgcaacagaagatattcttcaattgttgaagaataagagcgataacaagctgtataaactgacgaaaaatattcaatggccgaagacaaaactgcgtattgaacgcggagaaatgccggaaacactgctggaaattatgcaaaaagagcagtgcgacctccttgtctgtggtcatcatcacagttttatcaaccgtttgatgccggcatatcgcgggatgatcaataagatgagtgcggatttgctcatcgtgccgtttatcgataagtaaccgcttaccagtaatgctccgctgtcatatggcccggtcggcgacgtaaatgtttcgtcatctgccgggtctctttcagcaactgttgtgtatcgcgcaccatctgtggattgccgcacagcatcacatggctggtttctttattcatcggcaggccaatcgtgctttccagttccccactttcaattaatgccggtatccgtccggtgaggctccccgctgccgtttcccgactgaccaccgtctgaatgcgcagttttccttcgtagcgtttttccagttcctgcatcagtggcaaatagcttaagtcggcggcataacgtgcggcgtgcaccaggaccagatttttgaagcgatctaaatctttacctagttgcagaatgcttaaataagggccaatcgctgtaccggttgccagcatccatagcgtttcgcagtgcggcacttcatcgagcacaaagaatcctgccgcttcgctaaccacctgcacttcatcgcctggtttcagtgccgccagtcgtgggcttaatttgccatcggggacggtgaccaggtaaaactccagatcgggattatcggggctgtttacataggagtaggcgcgctggacgcgttcgccgtcgatttcaaggccaagcttggtaaattgcccggcggtaaacggaagcacgggggcgtgaacggtgagactaaacagggcgtcggtccagttctgcactttagtgactttgcctgttacccaatcagccatgtttttctcctgttttgattgacttgccttatcttcgttctccgaacaaaaaaattccagtcccgaaggactggaaggctcaatcgatcaaatcaatcagaggatgtgcacctgcatttccgggtctttgcgatccagatagtggatggactgaatgcggcgaatggtgcgactcttgccgcggatcagcagcgtttcggtagtcgcgatattgcctttgcggctaatgccttccagcagatcgcctttggtaataccggtggcagagaagatgacgttatcgctgcgcgccatatcgcccaggcgcaatactttaccggcttcgatgcccatcgctttgcagcgtgccagctcctgctcgccaatgcgacgattctcttcgttgtcgcctttgacgtcatgacgcgccagcagacgaccgttcatgtcgccatctaatgcgcggatcaccgccgcagaaactacgccttccggcgcgccaccaataccgtacagcacgtcaacttcgctgtctggcatacaggtgagaatactggccgcaacgtcgccgtccggaatagcaaatacgcgtacgccgagttgctgcatttcagcgataacggcatcgtggcgtggtttagccagaatcgttaccgtcagttcgctcaacggtttgccgagcgccgccgctacattgcgcaggttatccgccagcggcaggttcagatcaatggtgcctttggctcccggcccgacaatcagcttctccatatacatatccggcgcattgaggaagcagcctttatcgcctactgccagcaccgccagcgcgttagcctggcccatcgccgtcatgcgcgtgccttcaatcggatcaacagcaatatctaccgcgtcgccgcgaccagtaccgactttttcaccaatgtagagcatcggtgcttcgtcgatttcaccttcaccaatgacgatggtgccgtcaatgttgacctggttgagcataatacgcatggcgtttaccgccgcgccgtccgcggtgtttttatcgccgcgtcctaaccatttgtagccagccagcgccgcactttcggtgacgcgggaaaattcgatggcaagttctcgtctcatagcaaactctaagcagtaaggaatggcgcgaagtgtagcacaggggaagggagggattattgatgtgtgcggggttgcccccgcacgtttcgggactaccggatgcggcataaacgcttcattcggcatttacattattcgtcgtgttcttcccacgccatcgcgcgtttaaccgcttttttccagcctgcgtaacggtaattacgctcagtggtttcgatgcctggacggaactcgcgctcaatcaccgctttctcttgcagctcgtcgaggttctgccagaagccaaccgccaggcctgcgagataggccgcacccaatgcggtgacttcgcgcacttccgggcgctcaacgcgggtgccgagaatatcggactggaactgcatcaggaaattgtttgctactgcgccaccatccacgcgcagggcgtgcagacggataccagagtcggcctgcatcgcttccagcacgtcacgcgtctgataagcaatagactccagcgtcgcgcgtataatgtggttagcgttcaccccacgagtcagaccgaaaatcgccccgcgcgcatacgggtcccagtacggcgcacccagcccggtaaatgccggaaccacatacacaccattggtgttttgcactttggtggcgaaatattcggaatcgtaggcgtcgttaatcaacttcatttcatcgcgcagccactgaatggatgcgcctgccataaacaccgcaccttccaacgcatagttcacttcgccagtcgggccgcaggcgatggtggtcagcaggccgttttcacttttcaccgctttctcgccagtgttcatcagcataaagcagccagtgccataggtgttcttcgccatcccttctttcacgcacaactgaccaaacagcgcggcctgctggtcaccggcgatcccggagattggaatacgcgtgccgcctttgccgccaatgttagtctgaccgtatacttcggaagaacgacgcacttctggcagcatctcgcgcggaatatccagcacttccagcattttgtcgtcccagtccagggtatggatgttgaacaacatggtacgagaggcgttggtgtaatcggtcacatggacacggccctgagtcattttccagataagccacgtatcaaccgtaccaaacagcaattcaccacgacgtgcacgctcgcgagagccttccacatggtcgaggatccacttcactttggtgccagaaaagtacgggtcaatcaccagaccggtattgctgcggatataatcttctaaaccgtcacgttttaaatgctcgcagatttctgcggtacgacggcactgccagacaatggcgttatagataggcttgccggtttctttttcccagacaatagtggtttcacgctggttcgtaataccgatagctgcaatttgatcggaactgatatcggctttcgccagcacttctaccagcgtggagctttgggtggcccagatttccattgggtcgtgttctacccaacctggttttgggtagatttgctcaaattcgcgctggctcacgctaatgatattggcatcgtgatccattacgaccgcgcgggagctggtggtgccctggtcgagcgcaacgatatattttttttcagtcatgtttaattgtcccgtagtcatattacaggctagctttttgttcactaggagttgtggtttccttttcttccacaacacagatatcgcaaggcaaatggcgaccaatcagtttgcggtaggcaaatgcacctacaatcgcgccaacgatagggccgaaaagcggcaccaggaagtaaggaatgtctctgccgccggtaaaggcgacattgccccagcccgccagccaggcaaagactttcggaccgaagtcacgcgctgggttcatggcaaaacctgtcaatgggcccatagatgcgccaatgaccgcaatcagtagaccaatcagcaagggagccaaagggccgcgtggtacaccgttgccatcgtccgttaacgccaggatcagccccatcagaatagcggtaatcaccatctcaactgcgaaagcctgcacaaaattgatatgaggattagggtaagtagagaaagtgccagccagatcaacactttcaacgctgccgcgaacaatgtgatgagtctgctcgaagtcgaaaaataaattgtagtaaagcccgtaaactaaagccgcagcacagaaagcgccggcaacttgactaacgataaaaggaataactttgcgcttgtcgaaacaggcaaacagccacaatgcaatggtaacagcgggattaagatgcgcgccggaaacccctgcggtcaggtagatggccattgccacccccagtccccaaatgacactgatttcccactgaccaaaagacgcaccagcgacttttagtgctgcaacgcaacccacaccgaagaaaatcaacaacccggtaccgaggaattcagcaatgcactggcctttcaaggtacttgtttgactcataatcggatcctgaagagttaatgtttgttgtatgcgtgaaagtcacggacctccacgatgcttgtaggcatgctgtaaacttatcgttaacgagcaaaaacgagaaatatcgaacttaaaatgtgtgtgcctcgtcataaaatgagcgttatcgcgccatttattccatctgattgtacatgatgcatgtttgttagatcattcgcgcaacaaatttattaacattttcgattgatgtggattatgtcaccaggagaaggatgaaaagtgtggcaaaccgtaatctgcaaggcgtgccgctggacagcgatggcgcggcttcatacaatcggagctaactaaagtgcgctcgtatttattaaggcgtcaccggtaatcgggacgaggatttttatccatcaacgccttgcaattcaggagaggtatgacaatgagtttagaagtgtttgagaaactggaagcaaaagtacagcaggcgattgataccatcactctgttgcagatggaaatcgaagagctgaaagaaaaaaacaacagtctgagccaggaagttcaaaatgcccagcatcagcgcgaagagctggagcgtgagaacaaccatctgaaagaacagcagaacggctggcaggaacgtctgcaggccctgctgggtcgcatggaagaggtctgattacgcttcatcttccgcgtaatttctttactgtgtaggccaacaggtaacgcagaaaaaaggcaccttgcggtgcctttcttatcattcaatatccagcggatcttcactaagaataatcccggtattgtcggcataaagatggtcgccggagaagaaggtgacaccgccaaaattgacgcggacatcgctttcgccaatgccttcgccagcggcaccaaccggaattgccgccatcgcctggatgccgatatccaactcttccaggtcatctacctgacgcaccgcgccgtaaatgaccagaccttcccattcattttgtactgccagacgcgccagttcagcatcgaccagtgcgcgacgaacagaaccaccgccatcgacgacaagaacacgaccacggccattctgttcgagcagatcgtacagcaacccgttgtcctcgaaacattttaccgtgattatttgtccgccaaagctcgcccgtccgccaaagttggagaacagcggttccacgacgttaacatcttcttgatagatgtcacaaagctcggaagtatcgtatttcataggcttaacattcagttgctgcgagaattttcagtatatcgcgctatgtgggctgttggcaaaatcatcaattgttaattgatatttgtcagttatgctgcccactggcttaggaatatccctaaaacaaacagcaggttagtcagtaacgctcccttgacagtacgttccagcattggtcgcatcgccaccgggtccatttcccgcatcacataacgggcttgcttcaccagtaatggtgccgccagcaggaacagccagccccacaggctatgcaggctaaagagattaaacagcgccagacacaccaggctgcccatcagcaggcaggcatgataacgacgcgcgttcacttcacctaagcgcaccaccagcgtgtttttgccattttcgcggtcgctattgatatcacgcaggttattaatattcagtactgccgttgccagcaggccgcatgcggtcgccggaaggatcagtgccggaatcaatgtatgagcctgtaaataccagctccccatgacactcaaccagccaaagaaaaccagtacggaaatatcacccagaccgatataaccataaggacgattgcccacggtgtaggtgatagcggcaatgatgctcaacccgccaagaatcaggaaaccgacaaaatcggccagcgtatggcatgccactgcaaccagtgccagcccggagagacagatgagcacgacggtaataatgagcgcccgtttcatctcttgctgggtaatgacccctttttgcatgccgcgtagcggcccaatgcggtcaggtttatcgctgccttttaccgcatcgccgtaatcattggcgaggttagaaaggatctgtaatagcccggcggtaattagtgccagcagggcgaccagcggatcgaagtgaccttgccaccatgccagcgctgtcccgacgataattgcagcaaaggcgagggggagggttttaggtcgtaaactttccagccacgcctgagttcggctaatttgttgttcagtcataatacgcgccaataaaaatggggcctttcagccccatcaaacaatgatgaaaatgattgaacgcgattataggataaaacggctcagatcttcatctgccaccaacgcatccagatgtttgctcacataatctgcgtcaatagtgatattttgaccgcttaaatcgctggcgtcgtaggaaatctcttccattaaacgctccagaacagtgtgtaaacgacgagcaccgatgttttcggtagattcgttcacctgccatgccgcttccgcgatgcgtttaataccggagtcggtaaactcgatatttacgccttcagtcgccatcagtgctttgtactgcacggtgatagaggcattcggctcggtcagaatacgctcgaagtcgctggtggtcagcgcctgcagttcaacgcggattggcagacgaccttgcagttccgggatcaggtcagacggtttcgcaatctggaacgcgccagaagcgataaacagaatgtggtcagttttgaccatcccgtgtttggtggaaacggtgcaaccttctaccagcggcagcaggtcacgctgaacgccttcacgagaaacatccggaccggaagactcgccgcgcttacagattttgtcgatttcgtcgataaacacgatcccgtgctgctcaacagcgtcgatagcgtcttgcttcagctcttccgggttcaccagtttcgccgcttcttcttcaatcagcagcttcatggcgtctttgattttcagcttacgcgctttttgcttctggccgcccaggttctggaacatggactgcagctggctggtcatctcttccatgcccggaggagccataatttcaacgcccatcggtgctgcggcaagatcgatctcgatttctttgtcatcaagctggccttcacgcagttttttgcggaatgcctgacgagcagcggacggttcctgctgctgttcggtctgtccccagttgtttttagcaggtgggatcagcacgtcgagaatacgttcttctgccagttcttcagcgcgataacggtttttctcgatagcctggacgcgtaccattttcacggcggcatcggtcagatcgcgaataatagaatccacttccttaccgacgtagcccacttcggtgaatttggtcgcttcaactttgatgaacggcgcattcgccagcttagccagacgacgggcgatttcagttttaccgacaccggtcgggccgatcatcaggatatttttcggggtcacttcatggcgcagctcttcgttgagctgcatgcgacgccagcggttacgcagagcaatcgccacagaacgcttggcgttgtcctggccgatgatgtgcttatccagttcgctgacgatttcgcgtggggtcatttcagacatgggagatccttacgctttgtagcttaattcttcgatggtgtggaaatggttggtatagatgcaaatgtcgcctgcaatatccaacgccttttcagcaatttcacgggcgctaagttcagtgttttctaacagcgcgcgcgccgcagcctgggcgtaagggccgccggagccgatagcaataagatcgttttctggctgcaccacgtcaccgttaccggtgatgataaggcttgcagtttcatccgcgactgccagcagtgcttcaagtttgcgcagcatgcgatcggtacgccagtcttttgccagctcaacggcggctttgaccagatggccctgatgcatttccagtttacgttcaaacagttcgaacagcgtaaaagcatccgcagtaccgcccgcaaagcccgcgatgactttgtcgttgtacagacggcggacctttttcacgttgcctttcattacggtattgcccaacgtggcctgaccatcaccagcgatgaccacatggccgttacggcgtacgcttactatagttgtcacgagctgaccccttggttacgaatacagagtacaaaccccgtacaaaagtacggggcataatgcaattatagatgggggggattttgagggtttcaacccccggcggcgagccgaatgcagtttgtatgacccgccatcttcaaccgattgagggtgctgtctgcgttctctttgcctttcaccgggccaatgaccacacgattccagccattgttggtggtgattttgctgtcaaagccttcgaacgccagctgagcacgtaccgtctctgcctgttccgcgcctctgaagctaccgcactgcaccatccagcggcgttcgtcttttttctccgccgtcggttttggcgcgtcagcggcacgagcaactggcgcagcttgctgcggcttgctctgcgcagtcgtgtgcgcaggagtttgcagcagatcctggtacggctgctgagaagaagccggtttagactggcgcggttgcgcctgtaccggtgcggcttggctcgtacgcgtctgctgctgccagctttgttcagtcgtacggctctgctgagccaggcgttgctgttccgctaattgctgcgcctgacgttggcgctgtagcgtttgctgacgctgttccggcgtctgttcattccacggaacttcaaccagctgcgttggctgctggcgcatatcagcctgcatttgttcaagaagctgacgttgttctggtgtcagttgctccggcgttttcacttcaccaccggcagaaggttctgtgggcgcacgcactcccggctggcgactttccagctctttaatgtagcgccagcgttcttctggttttggtggtagtccgtttccggtcactttctggctttgcagcgtctcggactcttctttcttgtgatgcgtaatgaagtacagaccaccgataaaggtcacaagaacggcggcagcaatagcgaccatagcgggagaaaccgcaggcagatttcgttgctttttccgactggtgctcttttttcgccggctaggtgccggttggctgcggcgtacataatctcgttgtgccactatcgtttcgctgtatttattcgttcgtcagcccgccatgttacttaagcggcgggcctttgaccagtcacggcagtcttaaaggtttactttaaggtaacgcgcgtgtacttccccggatgataagttcgcagtccattaaacgagagccactgccaacgtgttgcccctgcatttgatcaagcaataacagcatagcttcccgaccgatttcgtaacgcggctgcgcgatggttgtcagcggcggatcacaaaattgcgtcaggtcgatgttatcaaaaccgattatggaaaggtcttccgggactttcagcccctggcgttttgcctgagaaagtgcgccgagcgccatcacatcgctatggcagaagacagcagtaggcggttgtggaagatcaagcagctgctgcatcgctttgcttccggcttcgaaggtgaagtcgccacgggcgatgtattgcggatcaaccataatgccgcagcgacgcagcgcctgaacatagccttgcaggcggtagtgacacagcggcatctcttcgggaccggctatacagccaatccgtttatgcccttgctcatataaataatttactgcatcaaatgcggcggtcagattgtcgatatgaactgtaggcagctccagctccggtgcaaattcgttcgccatcaccatcggcggcagattacgctgttcctcaatgctggcatcaaacggcagcctactacccagcaacaacatgccatcaatttgcttggtgatgatcaaatcgataaaggttttttcctgctgattttgatgcgcacagtcgccaatcagcaccagatatccgtgatttgccgccgtaacttcgataccgcgaataatttcgctaaagaagggatcgcagatatccgggacaatcaccagaatggtgcgggattcattacgcttgacgttgcgccccataggctgcggtaaataacccacttcccgggccgctttttcaacccgattacgggtggcctgggagactttatcgggattcattaatgctcgggagacggtcgctgtagagacttttgccttgagggcaacgtctttcatggtcgcggcagtttcctgcttcttcgctttcacactcactcctcgcctggcacgtcaggcgtactacatccatgtttacttcacatcggcaacatttttagcagatagcgcgtgaaaacggttacagaattttcatgaaaagtgtgatgaatattgaatttttcgatccgcctcgcatcgtgagcggtttaaccctcaatcggatcaacatccagcacccatttcaccttacgggaatccggtattgtattgatgagcgccagcgtaccgttaatgatgtgttgcaagcgcacgcgggaagggtgctgcaacaatatctgccagcgccagcgaccgccacgtttaggtgccagagccggaaccggaccgagaacccacagtttctcgtctgccagtgggctggagaggatcagattacgcagttgttgcaggaacaatggcgcgtgctgattgttatgatcttccgcacgcacaatcacatggctggtccacggcggtagctgcatcattcgccgctcagccagcgcctgttcggcaaaggcgtcgtagcctttatagagcaacgtttgcaacagaggatgttccggatggtgcgtttgcagcaccacttcgccctgtttacccgcacgcccggcacgaccggcgacctgggtgtaaagctgagcgaaacgctctgcgctgcgaaaatcggcagaaaacagcgcgccgtccacgtccagtaatgcaaccagcgtcacatccgggaaatggtgacctttcgccagcatttgtgtaccaatcaaaatccgcgcgccgccgcgatgtacttctgccagttgctgttccagcgcccctttgcggctggtggtatcgcggtcgatacgagaaatgggcacgccggggaacaacggcgcgagcgtctgttcaagctgttcggtgcccagccccacggggaccaggtgcgtggaaccgcaggaagggcactggcgcggcaccggacgctgactgtcacagtggtggcagcgcagatggtgctgcgcctgatgcagcgtgtagtagtgatcgcaacgtgggcattcggcaatccagccacagtcgtggcacagcagtgcaggcgcaaagccacggcggttaagaaagagaatgacctggttatcagcctgtaaatgctggcgcatacgagtgattaacgccggagccagacctgcctgcaccttctgaccttttaaatccagcacatgttgaattgccggacgcgcattccctgcccgacgggtcaggcgcagcaggcggtattttttctgctggacgttgcataacgtttccagcgcgggcgttgcggagccaagaataatcgggatttgctcgctgtgcgcacgatacaccgccaggtcgcgggcatgatagcgccagccttcctgctgcttgtaggagctgtcgtgctcttcatcaatgacaatcacgccgagatttttaaacggcgtaaacagcgcggagcgggtgccgatcacaatcgccgcctcaccatttttcgctttcagccacgcgctaagacgctcgctgtcgttcaggccggaatgcagaacttccacgggggcattaaaacgttcacgaaaacgggcgatagtttgcggtgtcaggccgatttccggcaccatcaccagcgcctgtttgccctgagcgagcacgttttccagtacgctgagataaacctccgttttaccggaaccggtaacgcccgccagcagccaggcagaaaaagtatctgccgcgctatgaattgcgccaacggcggtggcctgttcggtattcaatcgcaaccgctcaccagaaacggcatagttcgttcgccagtcgctaaactctggtgtttcacttgctaaatcacacagaccttttttgcgtagcgcctgcaacgcggcatcattaaattcgagcgtggcgacctggtcgcgccagattttgccttgccgtaacgccgccagcgcctgttgttgcttgggggagcgtttcaggctgttcagatccaccgcctggccttgttcagtggcaaaccagtaccacatcggcgcgttcgccgcaggccgcccctggcgtagtaaaatcggcaaggcatgaaacagcacatcgccaatcggatgatgatagtaatctgccgcccatagcagcaatcgccagacggagtgagtaaacaccggctcactatccagcacttcgactaccgcttttagctcattgagcggcagttcgctggcatcgctaacacttaccacaatcccgatgcgctcctgctgtttgccaaacggcacgcgcacgcgacacccagctttaaccgtcatgccttctggcagcagatagtcaaaggtacgaggaagcggaacgggcaaggcaacgtgggcaacgggcatagcatcatcctgacttgaaattcggtgggttagtatacacattgccgtagaagagtgcggatcagtttgcatacgctggttaatttctgtatgatttcgcgccttcgtacgaaatgatcgtattgaagctatacttttaacatcgcgtggtgtctggcgttagggctggaagagcgacgcggccttaaaccgaggttttcccatgaaaaaagatattcacccgaaatacgaagaaattactgctagctgctcttgcggtaacgtaatgaaaatccgctccaccgttggtcatgacctgaacctcgacgtgtgcagcaagtgccacccgttcttcactggcaaacagcgtgatgttgctaccggtggccgtgttgaccgcttcaacaagcgtttcaacatcccgggcagcaaataagaccggatttccgaaaaaagcgccgcacggcgctttttttgtgcctgaattttggtcgtattaccagctaaacagcggccattctttggcgaccgtggtgagttgtggcgcatcgaaaacggcttgtgggctgaccaccgtttcctcaagcggaatattcttgccgtaacgttctttgagctttgcctgaacttgtgggctgctcaggtcgaactctttcaacttctgctgctcgcccacgcgcattcccagcgcgttctggtaaaccttccacaccacttcgctacagtactggcgatcgtcgctccaactgaagctgaaatcatacggtttaccgagataacgttttgccgtttgcgccagtttttgctgttgttcaacactcagtccgccttcaacgcggcgaacaacgtatttgcccttttcaccatgggcgatccactgcttgagcggggtgtatttcaccgggccgactgcttcaaaaacgtagggctttttgttgcgtatcaccagcataccggtgtggctataatcggtatgggtcgccagttggatcgctttactttggctactgcgagagatctgaaagatgatgtcgccggtttgtggctgccaggcaaaggcaggtacagaaaccagcaggctgaggatcagcagcctgtttttcatagttaaacgtccatgtataaaaagcggtgggtcgcagacaacgtgctcgttgtttatgccggatgcggcgtgaacgccttatccggcctacaagttcgtgcaaattcaataaattgcaatatgacgtaggcctgataagcgtagcgcatcaggcgattccactccgcgccgctcttttttgctttagtattcccacgtctccgggttaatccccatctcacgcatgatctcttttgccgcttccgggatttcgtcgctgcgctctttacgcagatcggcatcatccggcaaaggttgcccggtaaaggcatgcagaaacgcttcgcacagcagctcgctgttggtagcgtgacgcaggttgttcacctgacgacgcgtgcgttcatcggtgaggatttttaacaccttaagaggaatggaaaccgtaatctttttgacttgttcactcttcttgccgtgctcagcgtatgggctgatatattcgccgctccattcagccatgagatacttaatcctcttcgtcaataaattgagaccagaccacacagttgatgtgggtactgaccgtaaacccgcatagtttaccgtacaggcgttaccgtgacatcgtgtaatgcacctgtcggcgtgataatgcatataattttaacggctatttgggatttgctcaatctatacgcaaagaagtttagatgtccagatgtattgacgtccattaacacaatgtttactctggtgcctgacatttcaccgacaaagcccagggaacttcatcacatgacgcgtaaacaggccaccatcgcagtgcgtagcgggttaaatgacgacgaacagtatggttgcgttgtcccaccgatccatctttccagcacctataactttaccggatttaatgaaccgcgcgcgcatgattacagccgtcgcggcaacccaacgcgcgatgtggttcagcgtgcgctggcagaactggaaggtggtgctggtgcagtacttactaataccggcatgtccgcgattcacctggtaacgaccgtctttttgaaacctggcgatctgctggttgcgccgcacgactgctacggcggtagctatcgcctgttcgacagtctggcgaaacgcggttgctatcgcgtgttgtttgttgatcaaggcgatgaacaggcattacgggcagcgctggcagaaaaacccaaactggtactggtagaaagcccaagtaatccattgttacgcgtcgtggatattgcgaaaatctgccatctggcaagggaagtcggggcggtgagcgtggtggataacaccttcttaagcccggcattacaaaatccgctggcattaggtgccgatctggtgttgcatagttgcacgaaatatctgaacggtcacagtgacgtagtggccggcgtggtgattgctaaagacccggacgttgtcactgaactggcctggtgggcaaacaatattggcgtgacgggcggcgcgtttgacagctatctgctgctacgtgggttgcgaacgctggtgccgcgtatggagctggcgcagcgcaacgcgcaggcgattgtgaaatacctgcaaacccagccgttggtgaaaaaactgtatcacccgagcttgccggaaaatcaggggcatgaaattgccgcgcgccagcaaaaaggctttggcgcaatgttgagttttgaactggatggcgatgagcagacgctgcgtcgtttcctgggcgggctgagcttgtttacgctggcggaaagtttagggggagtggaaagtttaatctctcacgccgcaaccatgacacatgcaggcatggcaccagaagcgcgtgctgccgccgggatctccgagacgctgctgcgtatctccaccggtattgaagatggcgaagatttaattgccgacctggaaaatggcttccgggctgcaaacaaggggtaaaaatgagtgtgattgcgcaggcaggggcgaaaggtcgtcagctgcataaatttggtggcagtagtctggctgatgtgaagtgttatttgcgtgtcgcgggcattatggcggagtactctcagcctgacgatatgatggtggtttccgccgccggtagcaccactaaccagttgattaactggttgaaactaagccagaccgatcgtctctctgcgcatcaggttcaacaaacgctgcgtcgctatcagtgcgatctgattagcggtctgctacccgctgaagaagccgatagcctcattagcgcttttgtcagcgaccttgagcgcctggcggcgctgctcgacagcggtattaacgacgcagtgtatgcggaagtggtgggccacggggaagtatggagcgcacgtctgatgtctgcggtacttaatcaacaagggctgccagcggcctggcttgatgcccgcgagtttttacgcgctgaacgcgccgcacaaccgcaggttgatgaagggctttcttacccgttgctgcaacagctgctggtgcaacatccgggcaaacgtctggtggtgaccggatttatcagccgcaacaacgccggtgaaacggtgctgctggggcgtaacggttccgactattccgcgacacaaatcggtgcgctggcgggtgtttctcgcgtaaccatctggagcgacgtcgccggggtatacagtgccgacccgcgtaaagtgaaagatgcctgcctgctgccgttgctgcgtctggatgaggccagcgaactggcgcgcctggcggctcccgttcttcacgcccgtactttacagccggtttctggcagcgaaatcgacctgcaactgcgctgtagctacacgccggatcaaggttccacgcgcattgaacgcgtgctggcctccggtactggtgcgcgtattgtcaccagccacgatgatgtctgtttgattgagtttcaggtgcccgccagtcaggatttcaaactggcgcataaagagatcgaccaaatcctgaaacgcgcgcaggtacgcccgctggcggttggcgtacataacgatcgccagttgctgcaattttgctacaccagtgaagtggccgacagtgcgctgaaaatcctcgacgaagcgggattacctggcgaactgcgcctgcgtcaggggctggcgctggtggcgatggtcggtgcaggcgtcacccgtaacccgctgcattgccaccgcttctggcagcaactgaaaggccagccggtcgaatttacctggcagtccgatgacggcatcagcctggtggcagtactgcgcaccggcccgaccgaaagcctgattcaggggctgcatcagtccgtcttccgcgcagaaaaacgcatcggcctggtattgttcggtaagggcaatatcggttcccgttggctggaactgttcgcccgtgagcagagcacgcttagcgcacgtaccggctttgagtttgtgctggcaggtgtggtggacagccgccgcagcctgttgagctatgacgggctggacgccagccgcgcgttagccttcttcaacgatgaagcggttgagcaggatgaagagagcttgttcctgtggatgcgcgcccatccgtatgatgatttagtggtgctggacgttaccgccagccagcagcttgctgatcagtatcttgatttcgccagccacggtttccacgttatcagcgccaacaaactggcgggagccagcgacagcaataaatatcgccagatccacgacgccttcgaaaaaaccgggcgtcactggctgtacaatgccaccgtcggtgcgggcttgccgatcaaccacaccgtgcgcgatctgatcgacagcggcgatactattttgagcatcagcgggatcttctccggcacgctctcctggctgttcctgcaattcgacggtagcgtgccgtttaccgagctggtggatcaggcgtggcagcagggcttaaccgaacctgacccgcgtgacgatctctctggcaaagacgtgatgcgcaagctggtgattctggcgcgtgaagcaggttacaacatcgaaccggatcaggtacgtgtggaaagcctggtgcctgctcattgcgaaggcggcagcatcgaccatttctttgaaaatggcgatgaactgaacgagcagatggtgcaacggctggaagcggcccgcgaaatggggctggtgctgcgctacgtggcgcgtttcgatgccaacggtaaagcgcgtgtaggcgtggaagcggtgcgtgaagatcatccgttggcaagtctgctgccgtgcgataacgtctttgccatcgaaagccgctggtatcgcgataaccctctggtgatccgcggacctggcgctgggcgcgacgtcaccgccggggcgattcagagcgatatcaaccggctggcacagttgttgtaatttcagaaatttaataatgcccggtactcatgttttcgggtttatggtttctaatgaaatatattgaattatcataggattaggccggattaagcgtttacgacgaatccggcaagaagcaataagtacatggttagtttatatttgcagtccggtttgctttgcataccggattttctttttcttaccatcctgaagttttttcatcttccctgatttttcctcaccatcattggtcatttttcggttgacgcccttcggcttttccttcatctttacatctggacgtctaaacggatagatgtgcacaacacaacatataactacaagcgattgatgaggtaaggtatgagcttttttcacgccagccagcgggatgccctgaatcagagcctggcagaagtccaggggcagattaacgttagcttcgagtttttcccgccgcgtaccagtgaaatggagcagaccctgtggaactccatcgatcgccttagcagcctgaaaccgaagtttgtaagcgtgacctatggcgcgaactccggcgagcgcgaccgtacgcacagcattattaaaggcattaaagatcgcactggtctggaagcggcaccgcatcttacttgcattgatgcgacgcccgacgagctgcgcaccattgcacgcgactactggaataacggtattcgtcatatcgtggcgctgcgtggcgatctgccgccgggaagtggtaagccagaaatgtatgcttctgacctggtgacgctgttaaaagaagtggcagatttcgatatctccgtggcggcgtatccggaagttcacccggaagcaaaaagcgctcaggcggatttgcttaatctgaaacgcaaagtggatgccggagccaaccgcgcgattactcagttcttcttcgatgtcgaaagctacctgcgttttcgtgaccgctgtgtaagcgcgggcattgatgtggaaattattccgggaattttgccggtatctaactttaaacaggcgaagaaatttgccgatatgaccaacgtgcgtattccggcgtggatggcgcaaatgttcgacggtctggatgatgatgccgaaacccgcaaactggttggcgcgaatattgccatggatatggtgaagattttaagccgtgaaggagtgaaagatttccacttctatacgcttaaccgtgctgaaatgagttacgcgatttgccatacgctgggggttcgacctggtttataaatagtgtggcttttgtgaaaatcacacagtgatcacaaattttaaacagagcacaaaatgctgcctcgaaatgagggcgggaaaataaggttatcagccttgttttctccctcattacttgaaggatatgaagctaaaacccttttttataaagcatttgtccgaattcggacataatcaaaaaagcttaattaagatcaatttgatctacatctctttaaccaacaatatgtaagatctcaactatcgcatccgtggattaattcaattataacttctctctaacgctgtgtatcgtaacggtaacactgtagaggggagcacattgatgagcacgagtgacgatatccataacaccacagccactggcaaatgcccgttccatcagggcggtcacgaccagagtgcgggggcgggcacaaccactcgcgactggtggccaaatcaacttcgtgttgacctgttaaaccaacattctaatcgttctaacccactgggtgaggactttgactaccgcaaagaattcagcaaattagattactacggcctgaaaaaagatctgaaagccctgttgacagaatctcaaccgtggtggccagccgactggggcagttacgccggtctgtttattcgtatggcctggcacggcgcggggacttaccgtagtatcgatggacgcggtggcgcgggtcgtggtcagcaacgttttgcaccgctgaactcctggccggataacgtaagcctcgataaagcgcgtcgcctgttgtggccaatcaaacagaaatatggtcagaaaatctcctgggccgacctgtttatcctcgcgggtaacgtggcgctagaaaactccggcttccgtaccttcggttttggtgccggtcgtgaagacgtctgggaaccggatctggatgttaactggggtgatgaaaaagcctggctgactcaccgtcatccggaagcgctggcgaaagcaccgctgggtgcaaccgagatgggtctgatttacgttaacccggaaggcccggatcacagcggcgaaccgctttctgcggcagcagctatccgcgcgaccttcggcaacatgggcatgaacgacgaagaaaccgtggcgctgattgcgggtggtcatacgctgggtaaaacccacggtgccggtccgacaagtaatgtaggtcctgatccagaagctgcaccgattgaagaacaaggtttaggttgggcgagcacttacggcagcggcgttggcgcagatgccattacctctggtctggaagtagtctggacccagacgccgacccagtggagcaactatttcttcgagaacctgttcaagtatgagtgggtacagacccgcagcccggctggcgcaatccagttcgaagcggtagacgcaccggaaattatcccggatccgtttgatccgagcaagaaacgtaaaccgacaatgctggtgaccgacctgacgctgcgttttgatcctgagttcgagaagatctctcgtcgtttcctcaacgatccgcaggcgttcaacgaagcctttgcccgtgcctggttcaaactgacgcacagggatatggggccgaaatctcgctacatcgggccggaagtgccgaaagaagatctgatctggcaagatccgctgccgcagccgatctacaacccgaccgagcaggacattatcgatctgaaattcgcgattgcggattctggtctgtctgttagtgagctggtaagcgtggcctgggcatctgcttctaccttccgtggtggcgacaaacgcggtggtgccaacggtgcgcgtctggcattaatgccgcagcgcgactgggatgtgaacgccgcagccgttcgtgctctgcctgttctggagaaaatccagaaagagtctggtaaagccagcctggcggatatcatagtgctggctggtgtggttggtgttgagaaagccgcaagcgccgcaggtttgagcattcatgtaccgtttgcgccgggtcgcgttgatgcgcgtcaggatcagactgacattgagatgtttgagctgctggagccaattgctgacggtttccgtaactatcgcgctcgtctggacgtttccaccaccgagagtctgctgatcgacaaagcacagcaactgacgctgaccgcgccggaaatgactgcgctggtgggcggcatgcgtgtactgggtgccaacttcgatggcagcaaaaacggcgtcttcactgaccgcgttggcgtattgagcaatgacttcttcgtgaacttgctggatatgcgttacgagtggaaagcgaccgacgaaagcaaagagctgttcgaaggccgtgaccgtgaaaccggcgaagtgaaatttacggccagccgtgcggatctggtgtttggttctaactccgtcctgcgtgcggtggcggaagtttacgccagtagcgatgcccacgagaagtttgttaaagacttcgtggcggcatgggtgaaagtgatgaacctcgaccgtttcgacctgctgtaatctgaccccgttcagcggctgcttgctggcagtcgctgaacgttctttaccagcgtatagtgggcgaacgaaaactacacactggatctctcatgtctgccgcaggaaagagcaacccactggcaatcagtggcctggttgtgctcacacttatctggagttatagctggattttcatgaagcaagtcaccagttacatcggtgccttcgactttaccgccttacgctgcattttcggcgctctcgttttattcatcgtccttttattacgtggtcgcggaatgcgcccgacaccgtttaaatacaccttagccattgccctgttacaaacctgcgggatggttggtctggcgcagtgggcgttggtcagcggaggtgcggggaaggtggcgatcctgagctataccatgccgttctgggtggtgattttcgccgcgttgtttctcggtgaacgcctgcgacgtgggcaatatttcgcgattctgattgccgctttcggcttatttttggtgttgcagccgtggcaactcgatttctctagcatgaaaagtgccatgctggcaatcctctccggcgtcagttggggggcgagcgcgattgttgctaaacgtctgtatgcccgtcatccgcgcgtggatttattgagcttaacatcctggcagatgctgtatgcggcgctggtgatgagtgtggtcgctttactggtgccgcaacgtgaaattgactggcagcccaccgtgttctgggcgctggcctacagtgcgattctggcgacggcactggcgtggagcttatggttgtttgtattgaaaaacttgcctgccagtattgccagcttaagcacactggccgttcccgtttgcggcgtactcttttcctggtggctgctcggcgagaatccgggggccgttgaaggtagcggtattgtgctgattgtgctggcactggcgctggtgagccgtaagaaaaaagaagccgtcagtgtaaaaaggatctgaattttttcttcatgtggggcgatctcttatttaacaaaataacgataatgccccaccatccgccagttaaacagcacatcttcttcctgcgcgcctgcgccaatgttatgtatcaccagcggcgtaccgtcgcgggcgaagccatcactaaccaccccaatatgtgccagcccgttatccagtcgccaggagacaatatcgcccgcttgatagtcactggggttcttgctggtggggcgtgttttatcatggcggctaaaccaggtttccagattaggcacccgacggtgatcgatgttgctgtccgggcgctttaacttccatttttgcgggtactcagcaaaattcttcgccatatcttcgtgaaccagtttctgcaaatcgaccttctggctgcgcaatgcgcggatcaccacatcggaacatacaccgcgttcttgcggaacatcaccgccaggataagtaagctgcacatacgccggatcgtaaaatagcgtgctgccaatttgctgtctggcaccgtctgcgatggcaaggttggtattggcctggatttgtaccacggttggtggaacggcgggagattttaaggagtggctggtaaatgccgttagcaggctgagcagcgccagactagctttcatctggttcgtccgtgaaaataagagtcacagattcgaccttccgggctaacgattgttctgtagagaaaatgtccagaagcggataaaaaattcctgaacaacgtgggagtttcagattactggcacagagtgccggatgcggagtgaacgccttatccggcctacaaaagcacgcaaattcaatatattgcagagattgcgtaggcctgataagcgtagcgcatcaggcaattttgcgttcaaactcccggacaagccgggagtttggagtaggttattcccactcttgcaggaaacgctgaccgtactggtcggctaccagcagagcggcgtaaacctgatctggcgtcgcgccgccaggcatgttgtgaatggtttcaccttctgcacatgccgcttctgccacaattcgcattttcgccgggacatcttctttaatatccagttgagcgagagttattggcaaacctaccgcatggctaagggcagctacggtttcgatttcctccaccggcgcattttccagaaccagctgcgtcagcgtaccgaatgccactttttcaccgtgataatagtgatgcgcgtccgggatagcggtcaggccgttatgcactgcgtgcgccgcagccagaccaccactttcaaaaccaacaccgctcaaataggtgttcgcttcaatcacgcgctccagcgccggagtcactacatgctgttcggcagcaagcatcgctttttcgccttcttccagcagggtgttgtagcacagttcagccagtgccagcgcagcctgggtgcacttgccgcccgccatggtggtcgcgccgctacgagagcaggcacgcgcttcaaaccaggttgccagcgcatcgccgatacccgccgctaacagacgtgcaggtgcgccagcgacgattttggtgtcgacaatgaccatattcgggttatttggcaacagcagatagcggtcaaactcaccctcatcggtgtagataacagacaatgcgctgcacggtgcatcggtagaggcgatagtcggtgcgatcgctaccggaacacccatgaaatgtgccagtgctttggcagtatcgagggtttttccgccaccgataccgagaattgcgccacactgcgcagtctccgcgatgccacgcagacggtcgatctcattttggctacattcaccgccaaacggcgcaatttctactaccagtccagcatctttaaagcttttctcgacagtggattgagcaaaacctaaaacaaatttgtcacccaccactaaccagcgttctgccagcggcttcaggtattcgcccagacgattaatcacatcagcgccctggatgtatttacccggactttgaataatgcggtccataattgctcctttagagatgagtagtgccaaatgcggcattccagtcgtgttcgaacttctctatagcactctctaccgcaggggtgttgagcatttgttgcgctacatctaagggcagggtgatggattcacatcctgccagtaaacagtccagcgcctgacgcggcgttttaaagctggctgccagcaccatgctttctggcgcgtgcatttctaacagcgtttgcagctcctgaaccgtacgaatgccgtctccgccctgggcatctacgcggttaacatacggagcaacgtattttgcccctgccagtgcggctaataacccttgtgcggcgctatatacagcagtgccaagtgtagtaataccctcttttttcagtattttaattgctgccagaccttcggaagtcaccgggattttcaccacaatacccggaatagcgtcgcgcaggcgcttcgcttcttccaccatcccctgcgcgtcgcggctcatggtctgagcaaacagaatgccctcatcaccaatcgctttttgcagacgcggcagcacttcccatatggactccttgctggcagcgataatgctcgggttagttgtcaccccggcaatggggaatatgcgtgccagacgttcgacttctgcgacgttagcggtgtccagatacagttccatgatgtttccttttacagttccagttcatgttgcagcaggctggcgatagcgtcggcagaggcggcgttaaccagcgcgttacggaattcttcgtgcatgatgcggcgagcgaggcggctgaaaatgcgcatatgctgatcgcccgcagcgtgtttgttcagggttaacataatgatgaattgcgcttcatcatcgccccagcgcaccggcgcttgcagacgcgccacgctgatggtggattgctcaatgtgttcacttttgctgtgtggaatggcaaaactaaagcccagaccggtagagaaaacggcctcgcgcgcccacaagtcggcttccagtttacgcggatagcggcagcggcccgccagcagcaggttatcggtcatgcctttgagcacttcttctttgctgcgccagtcgctttccagtgtgatgcactcggcggtgaccagcggtgcgtcttgttgggtcatgcggaattgcgccagcaggtgttctacttccaggctagtacggcaggccattgcctggttgagcaacttgcggcactcacggctatcaagttgcgccatccgagctttcgccgccggaatacttggtgcgctcatgctgagttcatccagccctaagccgaccagcaacggcagcacggaacctttcgctcccagctcaccgcacagaccaatccatttgccctggcgatgcaccgcttgcacggcgtaatcgagcgcccgcaagaatgccggattcaggctgttgtagtgacgagtaaccttagcgttatcgcgatccaccgccagcagatactgcgtcaggtcattactaccaatactaaagaaatcaatctcttcgcagcattgatcgatgatgaacatcacgctcggcacttccagcatgatgccgagctggattttctcatcaaacggaatgtgttcgttacgtagttgctgtttggcttccgccagtttttctttcacccataagatctcttccatactggagatcatcgggatcatgattttcaggctgccgtgagcggaggcgcggaggatgctccgtagctgcgtggtaaacaagctcgcgtactcttcataaatacgcacggcgcgataaccgaggaacgggtttgcctctgcgggaatgttcagataatcaacgggtttgtcgccgccaatgtccatagtgcgcacaataatgctgcgtccgttggcggattccagcgcctgacaaaaaatgttgtacaactcgctttcgcccggtgcgctggtgcgatccatatagagcatttcagtgcggaacaaaccaacgccttccgcaccattgccgaatgcggcctgcgcttccacggagtgagcgatgttagcggcaatttcaatgcggataccgtcagcggtacgggcttgttgggtcagccagacacgctgttgctcacgcagggcgtcctgtacgcgggcttcttgctgataataacgagctacggcttcccctggctcaaccacaatcgccccggcgttgccgtcgatataaatcgtttgttgctgccacggagtaagggcatcaatatccacaccaaccagcgttggaatgttgaagctacgggcaaggatcaccgtatgactggtggtgccgccgcttttgagcaacaatcctttgaggtgatttttatccagttcgaggaactggctgggggtcagttcatcagccatacaaatggcgggctgcgtcagtttgcccggtgccgggaagcgttgctcaccgtagatttgctggagtaactggaagcagacgtcgcgtacgtccagggcacgttcttgcaggtagctgctgctggaacgggaaaactcttcgcaaaagtgattcgcgctggcaacaattgcttcggcgcagcttaatccggcgctgacgcctgccagtaaatgttcgcgcagggaagtatcgccagccagggatcggtgagcttccagaatcgcgctggtagcaccgtcgctatccagcagacgaaactcaatgtttttcagtaccagcgtcaggccgttttccagtgcggattgctcggcgtcaacgcctttggctgcgggaagattacccagcgcattgagatctaaagaagagatcggcgtcagaatgccgcctgcactaccgctgcacacggtgcgggcgcggataatttgcggattcagattggtcagactaaccggcagtggttccagttcgtcagatttaacttccgccagcggcgcatcgcagtgggggaattcatcgcgcagccattggcttaaacgctggtgcgcttcctgttcgtcggccccggaaatcagtaactggcagttatcgcccgccagcgtatcggtgccaatcagcgcaagggcgcttttggcgttgcccttgcggtcagtgcgcaggttatgccactcaatttgactactaaaagtattacacagcgtttcaacgtggcttgccggacgcgcatgtacgccgttaggtagctcacaaataaattccacaatcagggccattgcctctctcccggtacggttttctgtttacaggataagagcgcacggcaacggcctgccatgtgacaaatctgccaaaagctggacaaatgtaatgtaaccgtcaatttgcgacgcgtctcacaagacgctgttttgcggcatgcttccggtttatcgcaagttatgaggcggatcgcatttttgtactgatattacaaaagtccagtaaatggcctttttatccactgtttgctccgcctgcgattgcctattgtttcctccatcaaaaatatggacatgggctttcgcaagcccgggagcagcttatgaatgagttggtgcagatcctgaaaaatacccgtcagcatttaatgacgggcgttagtcacatgattcccttcgtggtaagcggcggtattttgctggcggtttccgtcatgttgtatggcaaaggcgcagtgccggatgccgtagccgatccaaatctgaaaaaactgtttgatatcggcgttgcgggcttgacgctgatggtgcctttcctcgcagcgtacatcggttattccattgcagagcgttctgcgctggctccgtgcgctatcggtgcctgggttggtaacagctttggtgcgggcttctttggtgcactgatcgccgggattatcggcggcatcgtggtgcattacctgaagaaaattccggtgcataaagttctgcgcagcgtgatgcctatcttcattattcctatcgtcggcacactgattaccgcaggcatcatgatgtggggcttgggcgagcctgtaggggcgttgaccaacagcctgactcagtggcttcaggggatgcagcagggcagcattgttatgctggcggtgatcatgggtctgatgctggcgttcgatatgggcggtccggttaacaaagtggcctatgccttcatgctgatttgcgttgctcagggtgtttataccgtggtggccatcgctgccgtgggtatttgtatcccgccgctggggatggggctggcgacgctgattggtcgtaaaaatttctccgcagaagagcgcgaaaccggcaaagcggcactggtgatgggctgtgttggcgttactgaaggggcgattcctttcgccgctgccgatccgctgcgtgtcattccttccatcatggtcggtagtgtttgtggtgcagtaactgcggcgctggtcggtgcgcagtgctatgcaggctggggtggtctgattgtgctgccggtggttgaaggcaagctgggttatatcgcagcagtggctgtcggagcagtggtgacggctgtttgtgtgaacgtgctgaaaagtctggcgcgtaaaaatgggtctagcactgatgaaaaagaagacgacctggatttggattttgaaattaattaattgaggaacgagccatgacgaaaattattgcagtaaccgcatgtcctagtggtgttgcccatacctatatggcagcagaggcgctggaaagtgccgcgaaagcgaaaggctgggaagtgaaagtagaaacccaggggagtattggtctggaaaatgaactgactgcggaagatgtggcgagcgctgatatggtgattctgaccaaagatatcggcatcaagtttgaagagcgttttgctggcaagaccatcgtgcgcgtcaacatcagcgatgcagtaaaacgtgctgacgccattatgagcaaaattgaagctcacctggcgcaaaccgcttaagttcttctcccgctcgcaagggcgggttcgctttcccacaggagttcctcatgacgaatcgtatctctcgcctcaaaactgcactgtttgccaatacccgtgaaatcagcctggagcgggcgctgctttataccgccagccatcggcaaaccgaaggcgaaccggtgatattgcgccgggcgaaagcaacagcgtatatccttgaacatgttgaaattagcattcgtgatgaagaactgattgccggtaaccgcaccgtaaaaccgcgcgccgggattatgagcccggaaatggacccttactggctgctgaaagagctggatcaattcccgacgcgtccgcaggaccgctttgctatcagcgaagaagataaacgtatctaccgtgaagagttgttcccgtactgggaaaaacgtagcatgaaagatttcatcaacgggcagatgacagatgaagtaaaagccgcgaccaacacgcagattttcagcatcaaccagacggataaaggccaggggcacattattattgattacccacgcctgttgaatcacgggctgggtgagctggtggcacagatgcagcaacattgtcagcaacagccggagaatcacttttatcaggccgcgttgttactgctggaagccagccagaaacacattttgcgttacgccgaactggcggaaacgatggcggcaaactgcacagatgcccagcgtcgcgaagagctgctgactattgcagagatctcccgccataacgcgcaacataagccgcagacgttctggcaggcgtgccagttattctggtacatgaacatcattctgcaatacgaatccaacgccagtagcctaagcttggggcgcttcgaccagtatatgttgccgttctatcagacaagtttaacccagggcgaagatgcggcgttcctgaaagaactgctcgaatctttatgggtgaaatgcaacgacatcgtgctgttgcgctccaccagtagcgcgcgttatttcgccggtttcccgaccggctataccgcactgctcggcgggttaaccgagaacggacgtagcgcggtgaacgtgcttagcttcctttgccttgacgcctatcaaagcgtgcaattaccgcaaccgaacctcggcgtgcgcactaacgccttgatcgacacgccgttcctgatgaaaaccgccgaaaccattcgcttcggtaccggtattccgcaaatctttaacgatgaagtggtggtgccagcgttcctcaaccgtggcgttagcctggaagatgcgcgcgactattccgtagtgggctgtgtggaattatctattcccggcagaacctacggcttgcatgacatcgcgatgtttaatctgctgaaagtgatggaaatctgcctgcatgaaaatgaaggcaatgctgcgctgacttatgaaggtttactggagcagatccgcgccaagatcagccactacatcaccctgatggttgagggcagcaatatttgtgatatcggccatcgcgactgggcacctgtaccgctgctcagtagctttatcagcgattgtctggaaaaaggccgcgatattaccgatggcggcgcgcgttataacttctccggcgtacaggggatcggtatcgccaacctgagcgattctctccatgcgttgaaagggatggtttttgagcaacagcgtttaagttttgacgaattgctgagcgtattaaaagccaacttcgcaacgccagaaggcgaaaaagtccgcgctcgcttaattaaccgcttcgagaaatacggtaacgatatcgacgaggtggataacatcagcgccgaactgttgcgccactactgcaaagaagtggaaaaataccagaacccgcgcggcggctacttcacgccgggaagctataccgtttctgctcacgtcccgttgggaagcgtggttggcgcgacgccagacggtcgttttgccggagaacagctggcagacggcggcttgagtcccatgctgggccaggacgcacaagggccaacagcggtactgaagagtgtcagtaagctcgataacacgctgctgtctaacggtacgttgctgaacgtgaaattcactccggcgaccctggaaggtgaagcaggattacgcaaactggccgacttcttacgggcgtttacccagcttaagttacaacatattcagtttaacgtggtgaacgccgacacgttgcgggaagcgcaacagcgcccacaagattatgccgggctggtggtgcgcgttgccggatacagcgccttctttgtcgaactgagcaaggagatccaggatgacatcatccgccggacagcgcatcagctgtaattaaactgtcgaaggagatccaggatgacaagttccgccggacagcgcatcagctgtaacgttgtggaaacgcgccgcgatgatgtggcgcgcattttcaacattcagcgttatagtctgaatgacggcgagggcattcgtacggtggtcttttttaaaggctgtccgcatctttgcccgtggtgtgctaatccggagagcatctccggcaaaatccagacggtacgcagagaggcgaaatgtctgcactgtgcgaaatgtttgcgtgatgcggatgaatgcccctccggggcgtttgaacggattggtcgcgatatcagccttgacgctctggaacgggaagtgatgaaagatgacattttctttcgcacgtccggcggcggcgtcacgctttctggcggcgaagtgttaatgcaggcggagtttgctacccgttttttacagcgactgcggctgtggggtgtgagttgcgccattgaaactgccggagacgcaccagccagcaagctattaccgctggcgaaattgtgcgatgaagtgttgttcgatttaaaaattatggacgcgactcaggcgcgggatgtggtgaagatgaacctgccacgcgtgctggagaatctgcgtttgctggtgagtgagggcgtcaacgtgatcccgcgtttaccgctgatccctggtttcacgctcagccgggagaatatgcagcaggcgctggatgtactgatcccgctgaatatcaggcagatccatctgttaccgtttcatcagtacggcgaaccgaaataccgcctgctggggaaaacatggagcatgaaagaggtgcctgcgccgagcagtgctgatgtggcaacgatgcgcgaaatggcagaacgggccggacttcaggttaccgtgggaggttaaaatggcatacctggtggcagtaaccgcctgcgtaagcggcgtggcgcatacttatatggcggcggaacggctggaaaagttgtgcctgttagagaagtggggagtcagcattgaaactcagggcgcgctgggaacggagaatcgtttagcggatgaggatatccgccgggcggatgttgctctgttgattacggatatcgagcttgccggtgccgagcgatttgaacattgccgctatgtgcaatgcagcatctacgcattcctgcgtgagccgcagcgggtaatgagcgcggtgcgcaaagtgctttctgcgccgcagcaaacccatcttattctggagtaattattctggagtagtcggtttttctgtcagttggctgtggtactgccggcgatattcgctcgggctgcgttcggtgtttttacgaaacagacggcagaagtagttgctgtcgacaaagccgcaggcgtgcgccacttcttttaccttcaggtcatagcctttcaataacgtcttagcgtgctccagtcgcgtgtgattcaggtattcgttaaaaccaatggcccccgttttttgaaacaggtggctgaggtaatttgggctaatataaaacgcctgtgcaacagattcgcgggtaagcgcggaggcatagcgttcgtcgatataatcgcgaatagcttcaaatagtgcctggctgcgactggcggtctggatttggctgccaagcaaatcgcggcagtggctaagcaggctggcgacgataagccttgccgtttgctgctcctgcggctgcatttgcatttcattgagcgtttgtagcagaaaagaacctatgcgtgggccgcgtcgggcgacgtgttgcttcgccagattttgatattgtttgccatcccattgcacgacgctgaagccgagttgctgtttgccaaacagcacgctaaaggtagtagcgggggcttgccattgtggaaaattccagccaccagcaggaacgtacagcacatcgccgggaactaacgttgctccagcgccggtatcaacaaactcaccttccagcacaatttccagccgtggaaaatcgacctgatacgcaagatcgggcaccgggccgttactgctggcaaagtaaatctggcgcagggacagcgggccgttgatcaggcgggagagcagatagctgacgtcgtgatacatgttattcccttaggtatgtagacgggaaaacagtaactggcattattaaaaaaggccacctgaaaagtgtggcctgaggggagttcgatgtaaacattgcggcagttgtattgccggatgtggcgtaaacgccttatccagcctaccgccgcgatctgtaggccggataagacgcgtcaagcgtcgcatccggcaaatagcgcctggctgataattactgattacccacctgatcgccatagggcagtgtgtcgtaatcgatcagtgcgtttttcttatacgggttaccaatccagcgggtagtttctttgaactgcggattcaccacactacgggttggatcgtaaccgtcgtaagataagcccgccaaatcactccaggtgtggatcagttccgccaggctgtatttacgatcaacatcctggctgaaatcacggggatgagtcgcttgccatttttcactcgtccacagcaggaacggaatggtgtacatatgacgcgtcgggttgtcctcattacgcccctgagttttgtgcggcggcgtgtcgtaaacctcttcaccgtggtcagagaaataaaccaggaaaccgttcgggtttgctgctttaaagtctttaatcaggctggcaaccacatgatcgttatacaggttagcgttgtcataatcgttataactctccagctcttccgcgtttaatcccggcggaacatgatcggtattgccatcaaacttgccctgattttccgggtagcggtatttgtatttgatatgcgtacccagcagatgaacaatgatcagtttcttcggcgcagggtcattcagcacttcctggaacggcttcagcacgttggtgtcgtattcacgcgcactctgcgtacgttgctggttcatgtagtactgcttgtcggtctggcggctaaataccgtcagcatggtattgcgggcggtcatcgtctgctggttggtgatccagaaggttttataacccgcctgtttcatcatgttcatcaggctcggctgcgtcagatacagatccgggttcttttcattggcaaaggtcagcgcctgttgcaggatttcaatggtgtacggacgagacgtaactacgttattaaacacggtcagattcggatcggttttatgcagcgcatccagctccggcgtggtttcacgcggataaccgtacagactcatgcgtccgcgctgggtgctctcgccaatcaccagcactaaagtgcgcggttcgttaccgctttcatctttgaaattagccagtggcggcaaggcattattttcattcagtaactttgttaggctgtttagttgctgacgatactgataatagccggtcaggaattgccacggtgcggcaggctccatacggctggccaggttatccaacgttttctcaaacggcttgtttttgataaacgtattcatggcgatcggatgcagaatcaagccataaagcagggcaaaagagacaacataacgccacggctttggaatatagaccgggcgcaggcgtgtccacagcagaactgccaccgccgtataggccagcgcgataagcacaattttcaggctgaaatactggcttaaatactcgctggcttcgttggtgttggtttcgaacatcacaaacagaacgctctggctgaactcctgaccgtagatgacgtagtagcacagcgccgccagagaggccgcccatagcaccacgccgattactgcggcaataattttaatccgcttcggaaagaggaataccgggatcaaccacaggctactgaataacaggctgtcgcgaatgccgttagtgccactataaccactgatgtaaataatggcctgtagcagagtagagaaaaaccaaaagtagagcagtgcccaacccagggctttccagctaaaaagaggtttagcctggacttctgtggaatgcatagtaagaacctgtcttgaaaaaatatcgccgaatgtaacgacaattccttaaggatatctgaaggtatattcagaatttgaataaaatgcagacagaaatatattgaaaacgagggtgttagaacagaagtatttcagaaaaccctcgcgcaaaagcacgagggtttgcagaagaggaagattagccggtattacgcatacctgccgcaatcccggcaatagtgaccattaacgcttgttcgacgcgaggatccggttcctggccttctttttctgcctggcgggagcggtgcagcaactcggcctgcaatacgttcagcgggtcggtgtaaatattccgtagctgaatagactctgcaatccacggcagatcggccatcagatgggaatcgttggcaatcgccagcaccactttgatgtcttcttcttgcaggttgcgtaactctttacctaacggccacagtgctttgtctaccaggcgttggtcatagtattccgccagccacaggtctgctttggcgaagaccatctccagcatgccgagacgcgtgctgaagaatggccaatcgcggcacatagcctccagctcgctctgtttgccgtcttcgaccactttttgcagcgccgtacctgcacccagccaggcggggagcatcagacggttttgcgtccaggcgaagatccacggaatggcgcgtagactctcgacgccgccggttgggcgacgtttcgccggacgactacccaacggcagtttgcccagttcttgttccggcgtagcggagcggaagtaaggcacaaaatctttgttttcacgtacgtagccgcggtagacatcgcaggagatgacactcagttcatccataatgcgacgccagctctctttcggctccggcggtggcagcaggttggcttccagaatcgccccggtataaaggctcaggctgctgacggtgatttctggcagaccatatttaaagcggatcatctcgccctgttcggttacgcgcaggccgcctttcaggcttcctggcggttgactcagcagcgccgcatgagcaggtgcgccgccgcgaccaatggaaccgccgcgaccgtggaacaacgtcagctcaatacccgctttttcgcaggttttgattaatgcatcctgtgcctgatattgcgcccaggaagctgccatcactcccgcatcttttgcactgtcggaatagccaatcatcaccatctgtttgccctgaatcaggccacgataccagtcaatattgagcagctgggtcatgacatcgttggcgttgttcagatcatcgagggtttcaaacagcggagcaaccggcatcgcaaacccgatacccgcttctttcagcagcaggtggacagccagtacgtcggacggcgttttcgccatgctgatcacgtaggcggcaatggagccttgcggtgcttcggcaatcacctggcaggtatcgagcacttcgcgcgtttcggcgcttggttgccagttgcgcggcagaagcggacgtttggagttcagttcgcggatcaggaacgcctgtttgtcggcctcactccagctttcgtagtcgccgataccgaggtagcgggtcagctcgcccagcgcttcggtatgacgcgtgctctcctgacggatatcaatacggaccagcggtacgccgaaacatttcacgcggcgcagggtgtcgagcagatcgccgttggcgataatacccatgccacacgcctgaagactctggtagcaagcgtagagcggttcccacagttcttcgttttgtgtcagcaggccttctggttttggcagttcttcgcctttcaggcgcgcttccagccatgcctgtgtcgccatcaggcgagaacgcaggtttttcatcagatagcgatacggttctgcggcaccttcttcgccaaccagcgccagcagttcaggggtcgcttcaaccatgctcagttcagaaaccagcacctgaatatctttcaggaacaaatcggtggctttccagcggctgagtagcaggacgtggcgggtgatatcggcagtgacgttcgggttgccgtcgcggtcgccgcccatccagctagtaaaacggaccggaacaaattcgacgggcagtttgtagccgaggttctcttccagttgttcgttcagttcgcgcaggtaatttggtacgccttgccacaggctgttttccactacggcaaagccccatttggcttcatctaccgggcttggacgcagcttacggatttcatcggtatgccaactctgggcgatcaactggcgcaggcgacgcatcagctggttgtgttcgtagtcagcgatatctttgttatcgagctgttttaaacaggcgttcacttccaccattttgtggatcagtgtacgacgggtaatttcggttgggtgagccgtgaggaccagttccaggctcaggctttccactgcttttttgatggtgtcttcgctcagttccggctggtttttcagtttacgcagggtgcgggcgatcacttccgggttgctggcagcttcgcctttcgggctaatgctgtggtattgctcggcggtgttggccaggttcaggaactgactaaacgcacgcgcaacgggcagcagctcgtcgttgctcaaattttgtaaggtggtgagcaactcctggcggttagcatcattgccagcgcgactagatttgctcaacttacggatagtttctacgcgttcaagaatgtgttctcccaacgcatccttgatggtttctcccagcactttgccgagcatactgacattactacgcaatgcggaatattgttcgttcatattaccccagacaccccatcttatcgtttgatagccctgtatccttcacgtcgcattggcgcgaatatgctcgggctttgcttttcgtcgtcttttataaagccacgtaaaagcggtgacgtcaaatgctgcgaaatcgcttcagcaaacgaataaatagcaggaatttacgtcattaaattcacgacgctttaaataagcgtaacttatggaaatgttaaaaaatcgccccaagtaacaccaaaggtgtaggtcggataagatgcgcaagtatcgcatccgacattattgcggcactggagtttggcaacagtgccggatgcggcgcgagcgccttatccggcctacagttgggcatcgtttgagtcactgtcggtcggataagatgcgcaagtatcgcatccgacattattgcggcactggagtttggcaacagtgccggatgcggcgcgagcgccttatccggcctacggttgggcatcgtttgagtcactgtaggtcggataagatgcgcaagcatcgcatccgacattattgcggcactggagtttggcaacagcgccggatgcggcgcgagcgccttatccggcctacgttttaatgccagcaaaaatggtgaattacctgggttatcagttcgcgggtgggcttgataaaccgtgtttccagatattcatcaggttgatgagcctgattaatactgccaggccccaacaccagcgtcgggcataacgtttgaataaacggcgcttcggtacagtagttcaccacttcggtttttgctccgagcaatttctcaaccacttcaaccagttgatgattcggtgggcattcatagccagggatcggcggatgcagctcgtcgaccgtcagacgacccggccagcgttcgctcaccggagccaatgcatcgttgagcaaaccattaagttcattgagtgtcatgccaggcagcggacgaatatccatatgcaactcacagcaagcgcaaatacggttagaagcgtcgccaccgtgaatatgcccgaggttgagcgtagggtatggcacggtaaacgcttcgtagtgataacgttctttcaggttatcgcgcaattgcaaaatatgcccgatggcgtcgtgcattagttcgatagcgttaactccgcgtgctggatcgctggagtgcccgctctggccctgaatacggatggcgttagagatatgacctttatgtgcgcgtaccggttgtagactcgtcggttcgccaatgatggcgcaatccgggcgcagggcggtagtttcggcaaaataacgcgctccggccatactggtttcttcatcagcagtcgccagaatgtagagcggttttttcagtttcgtgacgtcgacatcgcgtagcgcatcaaggataaacgcaaaaaagcctttcatgtcggcggtgcctaagccgtaaagcttgccgtcatgctccgtcagtgtaaacggatcgcgcgtccagcgaccgtcatcaaatggcaccgtatcggtatgccccgccagcaacaagccgccagccccctgtccgatacttgccagcatattgaatttgttgcgagttcctggaacaggctgcacttccacattgaagcccaaatctttaaaccagtccgccagcagagtgattaaatctgcattgctttgatcgagtgcctcttccgtggcgcttatactaggtgtggcaatcagagcgcggtaaatctcgataaatggcggtaatttgtttttcattgttgacacacctctggtcatgatagtatcaatattcatgcagtatttatgaataaaaatacactaacgttgagcgtaataaaacccaccagccgtaaggtgaatgttttacgtttaacctggcaaccagacataagaaggtgaatagccccgatgttgaatacgctgattgtgggtgccagcggctacgctggcgcagagctagtgacctatgtaaatcgccatccgcatatgaacataaccgctttgactgttagtgcgcaaagcaatgatgcgggaaagttaatctccgatttgcatccgcagctaaaaggcatcgttgatctgccgttgcagccgatgagcgatatcagcgagtttagcccaggggtggacgtagtgtttctcgccaccgcccatgaagttagccacgatttagcgccgcagtttcttgaagcgggctgcgtggtgttcgacctttccggcgcgtttcgtgttaacgacgccaccttctatgaaaaatattacggctttacccatcaatacccggaactgttggaacaggcagcctacggtctggcggagtggtgcggtaataaattaaaagaagcgaatttgattgcggtgccgggctgttatccgacggcggcacagctggcgctgaaaccgttgattgatgccgatcttcttgacctcaatcagtggccggtgatcaacgccaccagcggcgtgagcggtgcagggcgtaaagcggccattagtaacagcttttgtgaagttagcctgcaaccgtatggcgtctttactcatcgccatcaaccagagatcgccacacacctcggtgctgacgttatcttcaccccacatctgggcaatttcccgcgcggcattctcgaaaccattacctgccgcctgaaaagcggtgtgacccaggcgcaagtcgcgcaagtgttacagcaggcgtatgcccataaaccgctggtgcggctgtatgacaaaggcgttccggcgctgaaaaatgtcgttgggctgccattttgcgatatcgggtttgccgttcagggcgagcatctgattattgtggcgaccgaagacaacttactgaaaggcgcggcggcacaagcggtacagtgcgccaatattcgtttcggctatgcggaaacgcagtctcttatttaagggtgcaatgatgaatccattaattatcaaactgggcggcgtactgctggatagtgaagaggcgctggaacgtctgtttagcgcactggtgaattatcgtgagagtcatcagcgtccgctggtgattgtgcacggcggcggttgcgtggtggatgagctgatgaaagggctgaatctgccggtgaaaaagaaaaacggcctgcgggtgacgcctgctgatcagatagacattatcaccggagcactggcgggaacggcaaataaaaccctgttggcatgggcgaagaaacatcagattgcggccgtaggtttgtttctcggtgacggcgacagcgtcaaagtgacccagcttgatgaagagttaggtcatgttggactggcgcagccaggtagccctaagcttatcaactccttgctggagaacggttatctgccggtggtcagctccattggcgtaacagacgaagggcaactgatgaacgtcaatgccgaccaggcggcaacggcgctggcggcaacgctgggcgcggatctgattttgctctccgacgtcagcggcattctcgacggcaaagggcaacgcattgccgaaatgaccgccgcgaaagcagaacaactgattgagcagggcattattactgacggcatgatagtgaaagtgaacgcggcgctggatgcggcccgcacgctgggccgtccggtagatatcgcctcctggcgtcatgcggagcagcttccggcactgtttaacggtatgccgatgggtacgcggattttagcttaagttttgttggccggaggcgcagctttccggcattgaatttcaaaataaggaaacagagttatggcactttggggcgggcgttttacccaggcagcagatcaacggttcaaacaattcaacgacagtctgcgctttgattaccgtctggcggagcaggatattgttggctctgtggcctggtccaaagccctggtcacggtaggcgtgttaaccgcagaagagcaggcgcaactggaagaggcgctgaacgtgttgctggaagatgttcgcgccaggccacaacaaatccttgaaagcgacgccgaagatatccatagctgggtggaaggcaaactgatcgacaaagtgggccagttaggcaaaaagctgcataccgggcgtagccgtaatgatcaggtagcgactgacctgaaactgtggtgcaaagataccgttagcgagttactgacggctaaccggcagctgcaaagcgcgctggtggaaaccgcacaaaacaatcaggacgcggtaatgccaggttacactcacctgcaacgcgcccagccggtgacgttcgcgcactggtgcctggcctatgttgagatgctggcgcgtgatgaaagccgtttgcaggatgcgcttaagcgtctggatgtcagcccgctaggctgtggcgcgctggcgggaacggcctatgaaatcgaccgtgaacagttagcaggctggctgggctttgctagcgcgacccgtaacagtctcgacagcgtttctgaccgtgaccatgtgttggaactgctttctgctgccgctatcggcatggtgcatctgagccgttttgctgaagatctgattttctttaacaccggcgaagcggggtttgtggagctttctgaccgcgtgacttccggtagtagtttaatgccgcagaagaaaaacccggatgcgctggagctgattcgcggtaaatgcggccgggtgcagggggcgttaaccggcatgatgatgacgctgaaaggtttgccgctggcttacaacaaagatatgcaggaagacaaagaaggtctgttcgacgcgctcgatacctggctggactgcctgcatatggcggcgctggtgctggacggcattcaggtgaaacgtccacgttgccaggaagcggctcagcagggttacgccaacgccaccgaactggcggattatctggtggcgaaaggcgtaccgttccgcgaggcgcaccatattgttggtgaagcggtggtggaagccattcgtcagggcaaaccgctggaagatctgccgctcagtgagttgcagaaattcagtcaggtgattgacgaagatgtctatccgattctgagcctgcaaagctgcctcgacaagcgtgcggcaaaaggcggcgtcagtccgcagcaggtggcgcaggcgattgcttttgcgcaggctcggttagggtaagaacatttatatgtataaatttgagcctggcttatcgccgggcttttttatggcaaaaaaaagcggatcctggagatccgcaaaagttcacgttggctttagttattcgagttgagaaactctcgaaacgggcagtgacttcaagggttaaaagaggtgccgctccgtttctgtgagcaattatcagtcagaatgcttgatagggataatcgttcattgctattctacctatcgccatgaactatcgtggcgatggaggatggataatgaatattcgtgatcttgagtacctggtggcattggctgaacaccgccattttcggcgtgcggcagattcctgccacgttagccagccgacgcttagcgggcaaattcgtaagctggaagatgagctgggcgtgatgttgctggagcggaccagccgtaaagtgttgttcacccaggcgggaatgctgctggtggatcaggcgcgtaccgtgctgcgtgaggtgaaagtccttaaagagatggcaagccagcagggcgagacgatgtccggaccgctgcacattggtttgattcccacagttggaccgtacctgctaccgcatattatccctatgctgcaccagacctttccaaagctggaaatgtatctgcatgaagcacagacccaccagttactggcgcaactggacagcggcaaactcgattgcgtgatcctcgcgctggtgaaagagagcgaagcattcattgaagtgccgttgtttgatgagccaatgttgctggctatctatgaagatcacccgtgggcgaaccgcgaatgcgtaccgatggccgatctggcaggggaaaaactgctgatgctggaagatggtcactgtttgcgcgatcaggcaatgggtttctgttttgaagccggggcggatgaagatacacacttccgcgcgaccagcctggaaactctgcgcaacatggtggcggcaggtagcgggatcactttactgccagcgctggctgtgccgccggagcgcaaacgcgatggggttgtttatctgccgtgcattaagccggaaccacgccgcactattggcctggtttatcgtcctggcagtccgctgcgcagccgctatgagcagctggcagaggccatccgcgcaagaatggatggccatttcgataaagttttaaaacaggcggtttaaaccgtttaacgcagctacccgataggcttccgccatcgtcgggtagttaaaggtggtgttgacgaagtactcaatagtgttgccgccacctttctgttccataatcgcctgaccgatatgaataatttcggcagcgcgctcgccaaagcagtgaatacccagaatctcttttgtttcccgatggaacaaaattttcagcgtgcccacgttcatgccgacgatttgtgcgcgtgccagatgtttaaactgggcgcggcccacttcatatggcactttcattgcggtcagctgctgttcggttttgcccacagagctgatttccgggatggtgtaaataccggtagggatatcttcaatcagatgtgcggtggcttcgccttttaccagcgcctgcgcggcaatgcgcccctggtcataggccgcgctcgccaggctcggataaccaatcacgtcgcccaccgcgtaaacgtgtggctgtgcggtctgatacatgctgttgaccttcagctgtccgcggctgtcagtttctagcccaatgttctgtaacgccaggctatcggtattaccggtgcgaccgttggcatagagcaggcagtcagctttcagttttttaccgctcttcagatgcatgatcacaccatcgtcacagccttcgatcttctcgtactcttcgttgtgacgaatcactacgccactgttccagaagtgataggagagagaatcactcatctcttgatcgagaaatgccagcaggcgatcgcgggtgttgatcagatccacttttacatccataccgcggaagatgctcgcatattcacagccgatcactccagcaccatagataagtacatggcgcggttcgtggtgcatgctgagaatactgtcgctgtcgtaaatgcgtggatgggtgaaatcaacatctgttggatgatatggacgagagccgcaggcaataacaaatttttcagcggttagtgtttcaacgctgccgtccgggcaatccagcgccaacgtatgctcgtcaacaaagcgagcgtttccctgcaatatttcacagtgattacgttcgtaaaatccctgacgcatgcgcgtttgttgattaatcacgttatcggcatggttaaggatatcggcaaaagaagagcggagcagtcgggaatggtcgctgtaaagtgggttttgattgaattctataatgcggctgacggcgtgacggagagctttgctcgggatggtgccccagtgggtgcaaccgccgccaacattttgataacgctcgataactgcgacgcgcgcaccttgcttaaccaggcccattgcagcgccttcgccgccggggccggaacctattactatggcatcgtaatcgtaggaatgtggcatggtagggcttacctgttcttatacataaaagcaacagaatggtaacattttatcgcgggtaagccaattgatccccgtcatttatctggctatatcctgagcggcctttgctttgtctgtttcttacttttgccctgacgttttattggatttttatcgacgatactctccgtttaagcggcaggtttccgctgtacgtaaaagaaccggccaaagaattgcagtaaatatgttttattgcgttaccgttcattcacaatactggagcaatccagtatgttcattctctggtatagtgccagcagtacttttggcaaggatagtgacatcgtgatgggcgtaagagcgcaacaaaaagaaaaaacccgccgtagcctggtggaagccgcatttagccaattaagtgctgaacgcagcttcgccagcctgagtttgcgtgaagtggcgcgtgaagcgggcattgctcccacctctttttatcggcatttccgcgacgtagacgaactgggtctgaccatggttgatgagagcggtttaatgctacgccaactcatgcgccaggcgcgtcagcgtatcgccaaaggcgggagtgtgatccgcaccagcgtctccacatttatggagttcatcggtaataatcctaacgccttccggttattattgcgggaacgctccggcacctccgctgcgtttcgtgccgccgttgcgcgtgaaattcagcacttcattgcggaacttgcggactatctggaactcgaaaaccatatgccgcgtgcgtttactgaagcgcaagccgaagcaatggtgacaattgtcttcagtgcgggtgccgaggcgttggacgtcggcgtcgaacaacgtcggcaattagaagagcgactggtactgcaactgcgaatgattagcaaaggggcttattactggtatcgccgtgaacaagagaaaaccgcaattattccgggaaatgtgaaggacgagtaatgaaacaagcaaatcaagatagaggtacgctgctgctggcgttagttgctggcttaagcattaatggtactttcgcagcgctgtttagctccattgtgccattttctgtattcccgattatttccctggtgctgacggtttactgcctgcatcaacgttatcttaatcgcactatgccggtaggcttgccgggtctggcagctgcctgttttattctcggcgtactgctgtacagcacggtagttcgtgcggaatatccggatatcggctctaacttcttcccggcagtactctccgtcattatggtgttctggattggcgcgaagatgcgtaaccgtaagcaggaagttgctgagtaatcggtattatgccggatgctggcgcatccggcatgggttttacttcgcggtcagtaatacgccgcactccatatggtgcgtgtaggggaactgatcaaacagagccagacgttcgaccttgtgcgtctggcttaatgtttccagattcttgcataacgtttccgggttacaggagatgtacaaaatacgcggatacgcctgcaccattttctcggtttcactgtccagaccgctgcgcggagggtcgacaaaaatggtttcgcactgataactctttaagtcgatcccttgcaggcggttaaactcgcgcacaccattcatcgcctgagtaaattcttctgccgccatacgaataatttgtacgttatcaatatggttagctgcgatgttgtattgcgcagcagcaacgctcggcttagcgatttcggtggctaatacccgatcaaaattacgcgccagcgctaaactaaagttaccgttgccgcagtacagctccagtaaatcgcctttactgcctttggttacgtccagcgcccattccagcatctgaatattcatcgccgcgttcggctgggtaaagctgttttctacctgacggtagatcatctctttccctgcgaccggcagacgttcatcgatgtaatcctgatccagctcgattttggttttcgttgcccgaccaatcagatgcacattcagattctgcgcgcgcagtgcatcgcgcagggcctccgcttcctgacgccactcatcatccagcttcttatggtatagcagggaaaccaccgcctgattactcagtgtagtgaggtaatcaatctggaacaacttgtggcgcagaacgggattattacgcacacccgcaatcatcgccgtcatcaactggttgataagttcactggcggcggggaagctatccacgcggatgcggcttttggtttgttgatcgaaaatgatgtgatacaggtcatcgccatcgtgccagatgcggaactccgcgcgcatccggtaatgactgaccgggctgcgaaacacttccggaaccaggtcagaaaacggtgccatcatactttgcaaacgtaccactttttcggctaactgcgcttcatactgttctgttggaaggtgttcgggggtcatgatgtatcctgaaaaattaaagtacgcggcgattgtagggattgctcatcagatgtccagatcttgatgaattcctatttgtgagctacgtctggacagtaacttgttacaacctgtagcatccacttgccggtcctgtgagttaatagggaatccagtgcgaatctggagctgacgcgcagcggtaaggaaaggtgcgatgattgcgttatgcggacactgccattcggtgggaagtcatcatctcttagtatcttagatacccctccaagcccgaagacctgccggccaacgtcgcatctggttctcatcatcgcgtaatattgatgaaacctgcggcatccttcttctattgtggatgctttacaatgattaaaaaagctagcctgctgacggcgtgttccgtcacggcattttccgcttgggcacaggataccagcccggatactctcgtcgttactgctaaccgttttgaacagccgcgcagcactgtgcttgcaccaaccaccgttgtgacccgtcaggatatcgaccgctggcagagcaccagcgtcaatgatgtgctgcgccgtcttccgggcgtcgatatcacccaaaacggcggtagtggtcagctcagttctatttttattcgcggtacaaatgccagtcatgtgttggtgttaattgatggcgtacgcctgaatctggcgggggtgagtggttctgccgaccttagccagttccctattgcgcttgtccagcgtgttgaatatatccgtgggccgcgctccgctgtttatggttccgatgcaataggcggggtggtgaatatcatcacgacgcgcgatgaacccggaacggaaattagtgcagggtggggaagcaatagttatcagaactatgatgtctctacgcagcaacaactgggggataagacacgggtaacgctgttgggcgattatgcccatactcatggttatgatgttgttgcctatggtaataccggaacgcaagcgcagacagataacgatggttttttaagtaaaacgctttatggcgcgctggagcataactttactgatgcctggagcggctttgtgcgcggctatggctatgataaccgtaccaattatgacgcgtattattctcccggtagtccgttgctcgatacccgtaaactctatagccaaagttgggacgccgggctgcgctataacggcgaactgattaaaagtcaactcattaccagctatagccatagcaaagattacaactacgatccccattatggtcgttatgatagcagcgcgacgctcgatgagatgaagcaatacaccgtccagtgggcaaacaatgtcatcgttggtcacggtagtattggtgcgggtgtcgactggcagaaacagactacgacgccgggtacaggttatgttgaggatggatatgatcaacgtaataccggcatctatctgaccgggctgcaacaagtcggcgattttacctttgaaggcgcagcacgcagtgacgataacagtcagtttggtcgtcatggaacctggcaaaccagcgccggttgggaattcatcgaaggttatcgcttcattgcttcctacgggacatcttataaggcaccaaatctggggcaactgtatggcttctacggaaatccgaatctggacccggagaaaagcaaacagtgggaaggcgcgtttgaaggcttaaccgctggggtgaactggcgtatttccggatatcgtaacgatgtcagtgacttgatcgattatgatgatcacaccctgaaatattacaacgaagggaaagcgcggattaagggcgtcgaggcgaccgccaattttgataccggaccactgacgcatactgtgagttatgattatgtcgatgcgcgcaatgcgattaccgacacgccgttgttacgccgtgctaaacagcaggtgaaataccagctcgactggcagttgtatgacttcgactggggtattacttatcagtatttaggcactcgctatgataaggattacagttcttatccttatcaaaccgttaaaatgggcggtgtgagcttgtgggatcttgcggttgcgtatccggtcacctctcacctgacagttcgtggtaaaatagccaacctgttcgacaaagattatgagacagtctatggctaccaaactgcaggacgggaatacaccttgtctggcagctacaccttctgaaccacgtcccaccgtgctggtgtttgactccggcgtcggtgggttgagcgtctatgacgagatccggcatctcttaccggatctccattacatttatgctttcgataacgtcgctttcccgtatggcgaaaaaagcgaagcgtttattgttgagcgagtggtggcaattgtcaccgcggtgcaagaacgttatccccttgcgctggctgtggtcgcttgcaacactgccagtaccgttagtcttcctgcattacgcgaaaagttcgacttcccggttgttggtgtcgtgccggcgattaaacctgctgcacgtctgacggcaaatggcattgtcggattactggcaacccgcggaacagttaaacgttcttatactcatgagctgatcgcgcgtttcgctaatgaatgccagatagaaatgctgggcagcgcagagatggttgagttggctgaagcgaagctacatggcgaagatgtttctctggatgcactaaaacgtatcctacgcccgtggttaagaatgaaagagccgccagataccgttgtattgggttgcacccatttccctctactacaagaagaactgttacaagtgctgccagagggaacccggctggtggattctggcgcagcgattgctcgccgaacggcctggttgttagaacatgaagccccggatgcaaaatctgccgatgcgaatattgccttttgtatggcaatgacgccaggagctgaacaattattgcccgttttacagcgttacggcttcgaaacgctcgaaaaactggcagttttaggctgatttggttgaatgttgcgcggtcagaaaattattttaaatttcctcttgtcaggccggaataactccctataatgcgccaccactgacacggaacaacggcaaacacgccgccgggtcagcggggttctcctgagaactccggcagagaaagcaaaaataaatgcttgactctgtagcgggaaggcgtattatgcacaccccgcgccgctgagaaaaagcgaagcggcactgctctttaacaatttatcagacaatctgtgtgggcactcgaagatacggattcttaacgtcgcaagacgaaaaatgaataccaagtctcaagagtgaacacgtaattcattacgaagtttaattctttgagcgtcaaacttttaaattgaagagtttgatcatggctcagattgaacgctggcggcaggcctaacacatgcaagtcgaacggtaacaggaagaagcttgcttctttgctgacgagtggcggacgggtgagtaatgtctgggaaactgcctgatggagggggataactactggaaacggtagctaataccgcataacgtcgcaagaccaaagagggggaccttcgggcctcttgccatcggatgtgcccagatgggattagctagtaggtggggtaacggctcacctaggcgacgatccctagctggtctgagaggatgaccagccacactggaactgagacacggtccagactcctacgggaggcagcagtggggaatattgcacaatgggcgcaagcctgatgcagccatgccgcgtgtatgaagaaggccttcgggttgtaaagtactttcagcggggaggaagggagtaaagttaatacctttgctcattgacgttacccgcagaagaagcaccggctaactccgtgccagcagccgcggtaatacggagggtgcaagcgttaatcggaattactgggcgtaaagcgcacgcaggcggtttgttaagtcagatgtgaaatccccgggctcaacctgggaactgcatctgatactggcaagcttgagtctcgtagaggggggtagaattccaggtgtagcggtgaaatgcgtagagatctggaggaataccggtggcgaaggcggccccctggacgaagactgacgctcaggtgcgaaagcgtggggagcaaacaggattagataccctggtagtccacgccgtaaacgatgtcgacttggaggttgtgcccttgaggcgtggcttccggagctaacgcgttaagtcgaccgcctggggagtacggccgcaaggttaaaactcaaatgaattgacgggggcccgcacaagcggtggagcatgtggtttaattcgatgcaacgcgaagaaccttacctggtcttgacatccacggaagttttcagagatgagaatgtgccttcgggaaccgtgagacaggtgctgcatggctgtcgtcagctcgtgttgtgaaatgttgggttaagtcccgcaacgagcgcaacccttatcctttgttgccagcggtccggccgggaactcaaaggagactgccagtgataaactggaggaaggtggggatgacgtcaagtcatcatggcccttacgaccagggctacacacgtgctacaatggcgcatacaaagagaagcgacctcgcgagagcaagcggacctcataaagtgcgtcgtagtccggattggagtctgcaactcgactccatgaagtcggaatcgctagtaatcgtggatcagaatgccacggtgaatacgttcccgggccttgtacacaccgcccgtcacaccatgggagtgggttgcaaaagaagtaggtagcttaaccttcgggagggcgcttaccactttgtgattcatgactggggtgaagtcgtaacaaggtaaccgtaggggaacctgcggttggatcacctccttaccttaaagaagcgtactttgtagtgctcacacagattgtctgatagaaagtgaaaagcaaggcgtttacgcgttgggagtgaggctgaagagaataaggccgttcgctttctattaatgaaagctcaccctacacgaaaatatcacgcaacgcgtgataagcaattttcgtgtccccttcgtctagaggcccaggacaccgccctttcacggcggtaacaggggttcgaatcccctaggggacgccacttgctggtttgtgagtgaaagtcgccgaccttaatatctcaaaactcatcttcgggtgatgtttgagatatttgctctttaaaaatctggatcaagctgaaaattgaaacactgaacaacgagagttgttcgtgagtctctcaaattttcgcaacacgatgatgaatcgaaagaaacatcttcgggttgtgaggttaagcgactaagcgtacacggtggatgccctggcagtcagaggcgatgaaggacgtgctaatctgcgataagcgtcggtaaggtgatatgaaccgttataaccggcgatttccgaatggggaaacccagtgtgtttcgacacactatcattaactgaatccataggttaatgaggcgaaccgggggaactgaaacatctaagtaccccgaggaaaagaaatcaaccgagattcccccagtagcggcgagcgaacggggagcagcccagagcctgaatcagtgtgtgtgttagtggaagcgtctggaaaggcgcgcgatacagggtgacagccccgtacacaaaaatgcacatgctgtgagctcgatgagtagggcgggacacgtggtatcctgtctgaatatggggggaccatcctccaaggctaaatactcctgactgaccgatagtgaaccagtaccgtgagggaaaggcgaaaagaaccccggcgaggggagtgaaaaagaacctgaaaccgtgtacgtacaagcagtgggagcacgcttaggcgtgtgactgcgtaccttttgtataatgggtcagcgacttatattctgtagcaaggttaaccgaataggggagccgaagggaaaccgagtcttaactgggcgttaagttgcagggtatagacccgaaacccggtgatctagccatgggcaggttgaaggttgggtaacactaactggaggaccgaaccgactaatgttgaaaaattagcggatgacttgtggctgggggtgaaaggccaatcaaaccgggagatagctggttctccccgaaagctatttaggtagcgcctcgtgaattcatctccgggggtagagcactgtttcggcaagggggtcatcccgacttaccaacccgatgcaaactgcgaataccggagaatgttatcacgggagacacacggcgggtgctaacgtccgtcgtgaagagggaaacaacccagaccgccagctaaggtcccaaagtcatggttaagtgggaaacgatgtgggaaggcccagacagccaggatgttggcttagaagcagccatcatttaaagaaagcgtaatagctcactggtcgagtcggcctgcgcggaagatgtaacggggctaaaccatgcaccgaagctgcggcagcgacgcttatgcgttgttgggtaggggagcgttctgtaagcctgcgaaggtgtgctgtgaggcatgctggaggtatcagaagtgcgaatgctgacataagtaacgataaagcgggtgaaaagcccgctcgccggaagaccaagggttcctgtccaacgttaatcggggcagggtgagtcgacccctaaggcgaggccgaaaggcgtagtcgatgggaaacaggttaatattcctgtacttggtgttactgcgaaggggggacggagaaggctatgttggccgggcgacggttgtcccggtttaagcgtgtaggctggttttccaggcaaatccggaaaatcaaggctgaggcgtgatgacgaggcactacggtgctgaagcaacaaatgccctgcttccaggaaaagcctctaagcatcaggtaacatcaaatcgtaccccaaaccgacacaggtggtcaggtagagaataccaaggcgcttgagagaactcgggtgaaggaactaggcaaaatggtgccgtaacttcgggagaaggcacgctgatatgtaggtgaggtccctcgcggatggagctgaaatcagtcgaagataccagctggctgcaactgtttattaaaaacacagcactgtgcaaacacgaaagtggacgtatacggtgtgacgcctgcccggtgccggaaggttaattgatggggttagcgcaagcgaagctcttgatcgaagccccggtaaacggcggccgtaactataacggtcctaaggtagcgaaattccttgtcgggtaagttccgacctgcacgaatggcgtaatgatggccaggctgtctccacccgagactcagtgaaattgaactcgctgtgaagatgcagtgtacccgcggcaagacggaaagaccccgtgaacctttactatagcttgacactgaacattgagccttgatgtgtaggataggtgggaggctttgaagtgtggacgccagtctgcatggagccgaccttgaaataccaccctttaatgtttgatgttctaacgttgacccgtaatccgggttgcggacagtgtctggtgggtagtttgactggggcggtctcctcctaaagagtaacggaggagcacgaaggttggctaatcctggtcggacatcaggaggttagtgcaatggcataagccagcttgactgcgagcgtgacggcgcgagcaggtgcgaaagcaggtcatagtgatccggtggttctgaatggaagggccatcgctcaacggataaaaggtactccggggataacaggctgataccgcccaagagttcatatcgacggcggtgtttggcacctcgatgtcggctcatcacatcctggggctgaagtaggtcccaagggtatggctgttcgccatttaaagtggtacgcgagctgggtttagaacgtcgtgagacagttcggtccctatctgccgtgggcgctggagaactgaggggggctgctcctagtacgagaggaccggagtggacgcatcactggtgttcgggttgtcatgccaatggcactgcccggtagctaaatgcggaagagataagtgctgaaagcatctaagcacgaaacttgccccgagatgagttctccctgaccctttaagggtcctgaaggaacgttgaagacgacgacgttgataggccgggtgtgtaagcgcagcgatgcgttgagctaaccggtactaatgaaccgtgaggcttaaccttacaacgccgaagctgttttggcggatgagagaagattttcagcctgatacagattaaatcagaacgcagaagcggtctgataaaacagaatttgcctggcggcagtagcgcggtggtcccacctgaccccatgccgaactcagaagtgaaacgccgtagcgccgatggtagtgtggggtctccccatgcgagagtagggaactgccaggcatcaaataaaacgaaaggctcagtcgaaagactgggcctttcgttttatctgttgtttgtcggtgaacgctctcctgagtaggacaaatccgccgggagcggatttgaacgttgcgaagcaacggcccggagggtggcgggcaggacgcccgccataaactgccaggcatcaaattaagcagaaggccatcctgacggatggcctttttgcgtttctacaaactcttcctgtcgtcatatctacaagccatccccccacagatacggtaaactagcctcgtttttgcatcaggaaagcagctatgaaccactccttaaaaccctggaacacatttggcattgatcataatgctcagcacattgtatgtgccgaagacgaacaacaattactcaatgcctggcagtatgcaaccgcagaaggacaacccgttcttattctgggtgaaggaagtaatgtactttttctggaggactatcgcggcacggtgatcatcaaccggatcaaaggtatcgaaattcatgatgaacctgatgcgtggtatttacatgtaggagccggagaaaactggcatcgtctggtaaaatacactttgcaggaaggtatgcctggtctggaaaatctggcattaattcctggttgtgtcggcagtagtcctatccagaatattggtgcttatggcgtagaattacagcgagtttgcgcttatgttgattctgttgaactggcgacaggcaagcaagtgcgcttaactgccaaagagtgccgttttggctatcgcgacagtatttttaaacatgaataccaggaccgcttcgctattgtagccgtaggtctgcgtctgccaaaagagtggcaacctgtactaacgtatggtgacttaactcgtctggatcctacaacagtaacgccacagcaagtatttaatgcggtgtgtcatatgcgcaccaccaaactccctgatccaaaagtgaatggcaatgccggtagtttcttcaaaaaccctgttgtatctgccgaaacggctaaagcattactgagtcaatttccaacagcaccaaattacccccaggcggatggtagtgtaaaactggcagcaggttggcttatcgatcagtgccagctaaaagggatgcaaataggtggggctgcggtgcaccgtcaacaggcgttagttctcattaatgaagacaatgcaaaaagcgaagatgttgtacagctggcgcatcatgtaagacagaaagttggtgaaaaatttaatgtctggcttgagcctgaagtccgctttattggtgcaagtggtgaagtgagcgcagtggagacaattagttgaaataaagcgcagtggagacaatttcatgaaggataacaccgtgccactgaaattgattgccctgttagcgaacggtgaatttcactctggcgagcagttgggtgaaacgctgggaatgagccgggcggctattaataaacacattcagacactgcgtgactggggcgttgatgtctttaccgttccgggtaaaggatacagcctgcctgagcctatccagttacttaatgctaaacagatattgggtcagctggatggcggtagtgtagccgtgctgccagtgattgactccacgaatcagtaccttcttgatcgtatcggagagcttaaaagcggcgatgcttgcattgcagaataccagcaggctggccgtggtcgccggggtcggaaatggtttagcccttttggcgcaaacttatatttgagcatgttctggcgtctggaacaaggcccggcggcggcgattggtttaagtctggttatcggtatcgtgatggcggaagtattacgcaagctgggtgcagataaagttcgtgttaaatggcctaatgacctctatctgcaggatcgcaagctggcaggcattctggtggagctgactggcaaaactggcgatgcggcgcaaatagtcattggagccgggatcaacatggcaatgcgccgtgttgaagagagtgtcgttaatcaggggtggatcacgctgcaggaagcggggatcaatctcgatcgtaatacgttggcggccatgctaatacgtgaattacgtgctgcgttggaactcttcgaacaagaaggattggcaccttatctgagccgctgggaaaagctggataattttattaatcgcccagtgaaacttatcattggtgataaagaaatatttggcattagtcgcggaatagacaaacagggggctttattacttgagcaggatggaataataaaaccctggatgggcggtgaaatatccctgcgtagtgcagaaaaataagaaaggggagtattcgctcccctgcaaattatttgcgtagtctgacctcttctaccgcatgattagcacttttcgtcaggattaaactggcgcgctcacgagtaggtagaatattttgctttaagttcagccagttgatctctttccacaatgtcatggcagtcttaatcgcttcttctttagttaatttcgcgtagttatgaaaataggaatccgggtcggtaaaagccccttcgcggaatttcagaaaacggttgatataccatgtctgaagtaagtcttccggtgcatcaacatatatgctaaaatcgacaaaatcagaaacaaatacatgatgtggatcgtgtggataatccatcccgctctgtaagacatttaacccttcaagaattaaaatatcaggctgaacaaccgttttatctccatccgggatcacatcataaataagatgactgtaaacaggtgctgtaacgtttggcacgccggatttgagatcggaaacaaacttcaccaggcgatgcatatcatagctttccgggaagcctttcttcttcatcagaccacgttctttcagaacctgattagggtgaaggaagccatctgtagtgatcagttcaacacgacgatgttccggccaacggcttaatagcgcctgcaatacacgggcggttgtacttttccccaccgcgacactgccagcaatactgataatgtaaggaatgcgttgcccgttggtaccaagaaactgttccagaactgcctgacggcgcagattgctgcttatatagaagttcagcaaacgactcaaaggtaaatagatctcggcaacttcttctaagctgagatcttcattaatacctttgagacgggcgatctcatcttcgcttaacgtcataggtacggaatcacgcagagctgcccactggttgcggtcaaactgtaggtaaggcgtcattaacgtttgctcttttatactcataagcatgtttctggcggtcatagctctatcggcaaagcgatatttgccatggcgcgtcacagttctgttgaatgggttaatgggcaggagggtaacaccagatggggaggaataataagaaaaaatctctgccaggaagctatcgttgaaaagcaatgtgacagatattccatctgataaaaagaattatggtttagcaggagcgcattgttgagcacaatgatgttgaaaaagtgtgctaatctgccctccgttcggctgtttcttcatcgtgtcgcataaaatgtgaccaataaaacaaattatgcaattttttagttgcatgaactcgcatgtctccatagaatgcgcgctacttgatgccgacttagctcagtaggtagagcaactgacttgtaatcagtaggtcaccagttcgattccggtagtcggcaccatcaagtccggtggggttcccgagcggccaaagggagcagactgtaaatctgccgtcacagacttcgaaggttcgaatccttcccccaccaccaatttcggccacgcgatggcgtagcccgagacgataagttcgcttaccggctcgaataaagagagcttctctcgatattcagtgcagaatgaaaatcaggtagccgagttccaggatgcgggcatcgtataatggctattacctcagccttccaagctgatgatgcgggttcgattcccgctgcccgctccaagatgtgctgatatagctcagttggtagagcgcacccttggtaagggtgaggtcggcagttcgaatctgcctatcagcaccacttcttttctcctccctgttttttccttctgtttattgcattcaacaagtcgggcatgttgcctggttgatgtggtgatatcaccgatttatccgtgtcttagagggacaatcgatgtctaaagaaaagtttgaacgtacaaaaccgcacgttaacgtcggtactatcggccacgttgaccatggtaaaacaacgctgaccgctgcaatcactaccgtactggctaaaacctacggcggtgctgctcgcgcattcgaccagatcgataacgcgccggaagaaaaagctcgtggtatcaccatcaacacttctcacgttgaatacgacaccccgacccgtcactacgcacacgtagactgcccggggcacgccgactatgttaaaaacatgatcaccggtgctgcgcagatggacggcgcgatcctggtagttgctgcgactgacggcccgatgccgcagactcgtgagcacatcctgctgggtcgtcaggtaggcgttccgtacatcatcgtgttcctgaacaaatgcgacatggttgatgacgaagagctgctggaactggttgaaatggaagttcgtgaacttctgtctcagtacgacttcccgggcgacgacactccgatcgttcgtggttctgctctgaaagcgctggaaggcgacgcagagtgggaagcgaaaatcctggaactggctggcttcctggattcttacattccggaaccagagcgtgcgattgacaagccgttcctgctgccgatcgaagacgtattctccatctccggtcgtggtaccgttgttaccggtcgtgtagaacgcggtatcatcaaagttggtgaagaagttgaaatcgttggtatcaaagagactcagaagtctacctgtactggcgttgaaatgttccgcaaactgctggacgaaggccgtgctggtgagaacgtaggtgttctgctgcgtggtatcaaacgtgaagaaatcgaacgtggtcaggtactggctaagccgggcaccatcaagccgcacaccaagttcgaatctgaagtgtacattctgtccaaagatgaaggcggccgtcatactccgttcttcaaaggctaccgtccgcagttctacttccgtactactgacgtgactggtaccatcgaactgccggaaggcgtagagatggtaatgccgggcgacaacatcaaaatggttgttaccctgatccacccgatcgcgatggacgacggtctgcgtttcgcaatccgtgaaggcggccgtaccgttggcgcgggcgttgtagcaaaagttctgagctaattgccgataacatttgacgcaatgcgcactaaaagggcatcatttgatgccctttttgcacgctttcgtaccagaacctggctcatcagtgattttctttgtcataatcattgctgagacaggctctgttgagggcgtataatccgaaaagctaatacgcgtttcgatttggtttgcctcgcgatcgcggggtgaaaatgtttgtagaaaacttctgacaggttggtttatgagtgcgaataccgaagctcaaggaagcgggcgcggcctggaagcgatgaagtgggtcgttgtggtggcattgctcctggtggcgattgtcggcaactatctttatcgcgacattatgctgccgctgcgtgcgctggccgtagtaattctgattgctgcagcgggtggtgtcgcgctgttaacgacaaaaggtaaagctaccgttgcttttgcccgtgaagcgcgtaccgaagtccgtaaggtcatttggccgactcgccaggaaacattgcacaccacgctgattgtggctgcggttaccgcagtaatgagtctgatcctgtggggactggatggtattctggttcgcctggtatcctttatcactggcctgaggttctgagatgtctgaagctcctaaaaagcgctggtacgtcgttcaggcgttttccggttttgaaggccgcgtagcaacgagcctgcgtgagcatatcaaattacacaacatggaagatttgtttggtgaagtcatggtaccaaccgaagaagtggttgaaatccgtggcggtcagcgtcgcaaaagcgaacgtaaattcttccctggctacgtcctcgttcagatggtgatgaacgacgcgagctggcacctggtgcgcagcgtaccgcgtgtgatgggcttcatcggcggtacttccgatcgtcctgcgccaatcagcgataaagaagtcgatgcgattatgaaccgcctgcagcaggttggtgataagccgcgtccgaaaacgctgtttgaaccgggtgaaatggtccgtgttaatgatggtccgttcgctgacttcaacggtgttgttgaagaagtggattacgagaaatctcgtctgaaagtgtctgtttctatcttcggtcgtgcgaccccggtagagctggacttcagccaggttgaaaaagcctaacccagcgatcaaaaaagcggcgatttaatcgttgcacaaggcgtgagattggaatacaatttcgcgccttttgtttttatgggccttgcccgtaaaacgattttttatatcacggggagcctctcagaggcgttattacccaacttgaggaatttataatggctaagaaagtacaagcctatgtcaagctgcaggttgcagctggtatggctaacccgagtccgccagtaggtccggctctgggtcagcagggcgtaaacatcatggaattctgcaaagcgttcaacgcaaaaactgattccatcgaaaaaggtctgccgattccggtagtaatcaccgtttacgctgaccgttctttcactttcgttaccaagaccccgccggcagcagttctgctgaaaaaagcggctggtatcaagtctggttccggtaagccgaacaaagacaaagtgggtaaaatttcccgcgctcagctgcaggaaatcgcgcagaccaaagctgccgacatgactggtgccgacattgaagcgatgactcgctccatcgaaggtactgcacgttccatgggcctggtagtggaggactaagaaatggctaaactgaccaagcgcatgcgtgttatccgcgagaaagttgatgcaaccaaacagtacgacatcaacgaagctatcgcactgctgaaagagctggcgactgctaaattcgtagaaagcgtggacgtagctgttaacctcggcatcgacgctcgtaaatctgaccagaacgtacgtggtgcaactgtactgccgcacggtactggccgttccgttcgcgtagccgtatttacccaaggtgcaaacgctgaagctgctaaagctgcaggcgcagaactggtaggtatggaagatctggctgaccagatcaagaaaggcgaaatgaactttgacgttgttattgcttctccggatgcaatgcgcgttgttggccagctgggccaggttctgggtccgcgcggcctgatgccaaacccgaaagtgggtactgtaacaccgaacgttgctgaagcggttaaaaacgctaaagctggccaggttcgttaccgtaacgacaaaaacggcatcatccacaccaccatcggtaaagtggactttgacgctgacaaactgaaagaaaacctggaagctctgctggttgcgctgaaaaaagcaaaaccgactcaggcgaaaggcgtgtacatcaagaaagttagcatctccaccaccatgggtgcaggtgttgcagttgaccaggctggcctgagcgcttctgtaaactaatgcctttacgtgggcggtgattttgtctacaatcttacccccacgtataatgcttaatgcagacgtatatccgagatattcgggttgtggcaaggcggcaactgagtgagtcgccaggagcatagctaactatgtgactggtgcgaatgaaggaagccaacgccgtcacaagctgaatagcgacggatagaaaagatttgttcgttggagcctggcctatccaggcctccgtcgaagaccgcaggagtttcgcaagaaacttaatcccctgcgtagacggtgacagaacgctaagattattcttttatattctggcttgtttctgctcaccgtaattaagacgctctctccgtttggaggagtgaagtgagttccagagattttctctggcaaacatccaggagcaaagctaatggctttaaatcttcaagacaaacaagcgattgttgctgaagtcagcgaagtagccaaaggcgcgctgtctgcagtagttgcggattcccgtggcgtaactgtagataaaatgactgaactgcgtaaagcaggtcgcgaagctggcgtatacatgcgtgttgttcgtaacaccctgctgcgccgtgctgttgaaggtactccgttcgagtgcctgaaagacgcgtttgttggtccgaccctgattgcatactctatggaacacccgggcgctgctgctcgtctgttcaaagagttcgcgaaagcgaatgcaaaatttgaggtcaaagccgctgcctttgaaggtgagctgatcccggcgtctcagatcgaccgcctggcaactctgccgacctacgaagaagcaattgcacgcctgatggcaaccatgaaagaagctagcgctggcaaactggttcgtactctggctgctgtacgcgatgcgaaagaagctgcttaatcgcagttatctttttaacgcattcgcttacgtataaacttattctgatattcaggaacaatttaaatgtctatcactaaagatcaaatcattgaagcagttgcagctatgtctgtaatggacgttgtagaactgatctctgcaatggaagaaaaattcggtgtttccgctgctgctgctgtagctgtagctgctggcccggttgaagctgctgaagaaaaaactgaattcgacgtaattctgaaagctgctggcgctaacaaagttgctgttatcaaagcagtacgtggcgcaactggcctgggtctgaaagaagctaaagacctggtagaatctgcaccggctgctctgaaagaaggcgtgagcaaagacgacgcagaagcactgaaaaaagctctggaagaagctggcgctgaagttgaagttaaataagccaacccttccggttgcagcctgagaaatcaggctgatggctggtgactttttagtcaccagcctttttgcgctgtaaggcgccagtagcgtttcacactgtttgactactgctgtgcctttcaatgcttgtttctatcgacgacttaatatactgcgacaggacgtccgttctgtgtaaatcgcaatgaaatggtttaagcgtgatagcaacaggcattgcggaaagtgttccattttccggtcaacaaaatagtgttgcacaaactgtccgctcaatggacagatgggtcgacttgtcagcgagctgaggaaccctatggtttactcctataccgagaaaaaacgtattcgtaaggattttggtaaacgtccacaagttctggatgtaccttatctcctttctatccagcttgacagctttcagaaatttatcgagcaagatcctgaagggcagtatggtctggaagctgctttccgttccgtattcccgattcagagctacagcggtaattccgagctgcaatacgtcagctaccgccttggcgaaccggtgtttgacgtccaggaatgtcaaatccgtggcgtgacctattccgcaccgctgcgcgttaaactgcgtctggtgatctatgagcgcgaagcgccggaaggcaccgtaaaagacattaaagaacaagaagtctacatgggcgaaattccgctcatgacagacaacggtacctttgttatcaacggtactgagcgtgttatcgtttcccagctgcaccgtagtccgggcgtcttctttgactccgacaaaggtaaaacccactctagcggtaaagtgctgtataacgcgcgtatcatcccttaccgtggttcctggctggacttcgaattcgatccgaaggacaacctgttcgtacgtatcgaccgtcgccgtaaactgcctgcgaccatcattctgcgcgccctgaactacaccacagagcagatcctcgacctgttctttgaaaaagttatctttgaaatccgtgataacaagctgcagatggaactggtgccggaacgcctgcgtggtgaaaccgcatcttttgacatcgaagctaacggtaaagtgtacgtagaaaaaggccgccgtatcactgcgcgccacattcgccagctggaaaaagacgacgtcaaactgatcgaagtcccggttgagtacatcgcaggtaaagtggttgctaaagactatattgatgagtctaccggcgagctgatctgcgcagcgaacatggagctgagcctggatctgctggctaagctgagccagtctggtcacaagcgtatcgaaacgctgttcaccaacgatctggatcacggcccatatatctctgaaaccttacgtgtcgacccaactaacgaccgtctgagcgcactggtagaaatctaccgcatgatgcgccctggcgagccgccgactcgtgaagcagctgaaagcctgttcgagaacctgttcttctccgaagaccgttatgacttgtctgcggttggtcgtatgaagttcaaccgttctctgctgcgcgaagaaatcgaaggttccggtatcctgagcaaagacgacatcattgatgttatgaaaaagctcatcgatatccgtaacggtaaaggcgaagtcgatgatatcgaccacctcggcaaccgtcgtatccgttccgttggcgaaatggcggaaaaccagttccgcgttggcctggtacgtgtagagcgtgcggtgaaagagcgtctgtctctgggcgatctggataccctgatgccacaggatatgatcaacgccaagccgatttccgcagcagtgaaagagttcttcggttccagccagctgtctcagtttatggaccagaacaacccgctgtctgagattacgcacaaacgtcgtatctccgcactcggcccaggcggtctgacccgtgaacgtgcaggcttcgaagttcgagacgtacacccgactcactacggtcgcgtatgtccaatcgaaacccctgaaggtccgaacatcggtctgatcaactctctgtccgtgtacgcacagactaacgaatacggcttccttgagactccgtatcgtaaagtgaccgacggtgttgtaactgacgaaattcactacctgtctgctatcgaagaaggcaactacgttatcgcccaggcgaactccaacttggatgaagaaggccacttcgtagaagacctggtaacttgccgtagcaaaggcgaatccagcttgttcagccgcgaccaggttgactacatggacgtatccacccagcaggtggtatccgtcggtgcgtccctgatcccgttcctggaacacgatgacgccaaccgtgcattgatgggtgcgaacatgcaacgtcaggccgttccgactctgcgcgctgataagccgctggttggtactggtatggaacgtgctgttgccgttgactccggtgtaactgcggtagctaaacgtggtggtgtcgttcagtacgtggatgcttcccgtatcgttatcaaagttaacgaagacgagatgtatccgggtgaagcaggtatcgacatctacaacctgaccaaatacacccgttctaaccagaacacctgtatcaaccagatgccgtgtgtgtctctgggtgaaccggttgaacgtggcgacgtgctggcagacggtccgtccaccgacctcggtgaactggcgcttggtcagaacatgcgcgtagcgttcatgccgtggaatggttacaacttcgaagactccatcctcgtatccgagcgtgttgttcaggaagaccgtttcaccaccatccacattcaggaactggcgtgtgtgtcccgtgacaccaagctgggtccggaagagatcaccgctgacatcccgaacgtgggtgaagctgcgctctccaaactggatgaatccggtatcgtttacattggtgcggaagtgaccggtggcgacattctggttggtaaggtaacgccgaaaggtgaaactcagctgaccccagaagaaaaactgctgcgtgcgatcttcggtgagaaagcctctgacgttaaagactcttctctgcgcgtaccaaacggtgtatccggtacggttatcgacgttcaggtctttactcgcgatggcgtagaaaaagacaaacgtgcgctggaaatcgaagaaatgcagctcaaacaggcgaagaaagacctgtctgaagaactgcagatcctcgaagcgggtctgttcagccgtatccgtgctgtgctggtagccggtggcgttgaagctgagaagctcgacaaactgccgcgcgatcgctggctggagctgggcctgacagacgaagagaaacaaaatcagctggaacagctggctgagcagtatgacgaactgaaacacgagttcgagaagaaactcgaagcgaaacgccgcaaaatcacccagggcgacgatctggcaccgggcgtgctgaagattgttaaggtatatctggcggttaaacgccgtatccagcctggtgacaagatggcaggtcgtcacggtaacaagggtgtaatttctaagatcaacccgatcgaagatatgccttacgatgaaaacggtacgccggtagacatcgtactgaacccgctgggcgtaccgtctcgtatgaacatcggtcagatcctcgaaacccacctgggtatggctgcgaaaggtatcggcgacaagatcaacgccatgctgaaacagcagcaagaagtcgcgaaactgcgcgaattcatccagcgtgcgtacgatctgggcgctgacgttcgtcagaaagttgacctgagtaccttcagcgatgaagaagttatgcgtctggctgaaaacctgcgcaaaggtatgccaatcgcaacgccggtgttcgacggtgcgaaagaagcagaaattaaagagctgctgaaacttggcgacctgccgacttccggtcagatccgcctgtacgatggtcgcactggtgaacagttcgagcgtccggtaaccgttggttacatgtacatgctgaaactgaaccacctggtcgacgacaagatgcacgcgcgttccaccggttcttacagcctggttactcagcagccgctgggtggtaaggcacagttcggtggtcagcgtttcggggagatggaagtgtgggcgctggaagcatacggcgcagcatacaccctgcaggaaatgctcaccgttaagtctgatgacgtgaacggtcgtaccaagatgtataaaaacatcgtggacggcaaccatcagatggagccgggcatgccagaatccttcaacgtattgttgaaagagattcgtagcctgggtatcaacatcgaactggaagacgagtaattctcgctcaaacaggtcactgctgtcgggttaaaacccggcagcggattgtgctaactccgacgggagcaaatccgtgaaagatttattaaagtttctgaaagcgcagactaaaaccgaagagtttgatgcgatcaaaattgctctggctagcccagacatgatccgtagttggtctttcggtgaagttaaaaagccggaaaccatcaactaccgtacgttcaaaccagaacgtgacggccttttctgcgcccgtatctttgggccggtaaaagattacgagtgcctgtgcggtaagtacaagcgcctgaaacaccgtggcgtcatctgtgagaagtgcggcgttgaagtgacccagactaaagtacgccgtgagcgtatgggccacatcgaactggcttccccgactgcgcacatctggttcctgaaaagcctgccgtcccgtatcggtctgctgctcgatatgccgctgcgcgatatcgaacgcgtactgtactttgaatcctatgtggttatcgaaggcggtatgaccaacctggaacgtcagcagatcctgactgaagagcagtatctggacgcgctggaagagttcggtgacgaattcgacgcgaagatgggggcggaagcaatccaggctctgctgaagagcatggatctggagcaagagtgcgaacagctgcgtgaagagctgaacgaaaccaactccgaaaccaagcgtaaaaagctgaccaagcgtatcaaactgctggaagcgttcgttcagtctggtaacaaaccagagtggatgatcctgaccgttctgccggtactgccgccagatctgcgtccgctggttccgctggatggtggtcgtttcgcgacttctgacctgaacgatctgtatcgtcgcgtcattaaccgtaacaaccgtctgaaacgtctgctggatctggctgcgccggacatcatcgtacgtaacgaaaaacgtatgctgcaggaagcggtagacgccctgctggataacggtcgtcgcggtcgtgcgatcaccggttctaacaagcgtcctctgaaatctttggccgacatgatcaaaggtaaacagggtcgtttccgtcagaacctgctcggtaagcgtgttgactactccggtcgttctgtaatcaccgtaggtccatacctgcgtctgcatcagtgcggtctgccgaagaaaatggcactggagctgttcaaaccgttcatctacggcaagctggaactgcgtggtcttgctaccaccattaaagctgcgaagaaaatggttgagcgcgaagaagctgtcgtttgggatatcctggacgaagttatccgcgaacacccggtactgctgaaccgtgcaccgactctgcaccgtctgggtatccaggcatttgaaccggtactgatcgaaggtaaagctatccagctgcacccgctggtttgtgcggcatataacgccgacttcgatggtgaccagatggctgttcacgtaccgctgacgctggaagcccagctggaagcgcgtgcgctgatgatgtctaccaacaacatcctgtccccggcgaacggcgaaccaatcatcgttccgtctcaggacgttgtactgggtctgtactacatgacccgtgactgtgttaacgccaaaggcgaaggcatggtgctgactggcccgaaagaagcagaacgtctgtatcgctctggtctggcttctctgcatgcgcgcgttaaagtgcgtatcaccgagtatgaaaaagatgctaacggtgaattagtagcgaaaaccagcctgaaagacacgactgttggccgtgccattctgtggatgattgtaccgaaaggtctgccttactccatcgtcaaccaggcgctgggtaaaaaagcaatctccaaaatgctgaacacctgctaccgcattctcggtctgaaaccgaccgttatttttgcggaccagatcatgtacaccggcttcgcctatgcagcgcgttctggtgcatctgttggtatcgatgacatggtcatcccggagaagaaacacgaaatcatctccgaggcagaagcagaagttgctgaaattcaggagcagttccagtctggtctggtaactgcgggcgaacgctacaacaaagttatcgatatctgggctgcggcgaacgatcgtgtatccaaagcgatgatggataacctgcaaactgaaaccgtgattaaccgtgacggtcaggaagagaagcaggtttccttcaacagcatctacatgatggccgactccggtgcgcgtggttctgcggcacagattcgtcagcttgctggtatgcgtggtctgatggcgaagccggatggctccatcatcgaaacgccaatcaccgcgaacttccgtgaaggtctgaacgtactccagtacttcatctccacccacggtgctcgtaaaggtctggcggataccgcactgaaaactgcgaactccggttacctgactcgtcgtctggttgacgtggcgcaggacctggtggttaccgaagacgattgtggtacccatgaaggtatcatgatgactccggttatcgagggtggtgacgttaaagagccgctgcgcgatcgcgtactgggtcgtgtaactgctgaagacgttctgaagccgggtactgctgatatcctcgttccgcgcaacacgctgctgcacgaacagtggtgtgacctgctggaagagaactctgtcgacgcggttaaagtacgttctgttgtatcttgtgacaccgactttggtgtatgtgcgcactgctacggtcgtgacctggcgcgtggccacatcatcaacaagggtgaagcaatcggtgttatcgcggcacagtccatcggtgaaccgggtacacagctgaccatgcgtacgttccacatcggtggtgcggcatctcgtgcggctgctgaatccagcatccaagtgaaaaacaaaggtagcatcaagctcagcaacgtgaagagcgttgtgaactccagcggtaaactggttatcacttcccgtaatactgaactgaaactgatcgacgaattcggtcgtactaaagaaagctacaaagtaccttacggtgcggtactggcgaaaggcgatggcgaacaggttgctggcggcgaaaccgttgcaaactgggacccgcacaccatgccggttatcaccgaagtaagcggttttgtacgctttactgacatgatcgacggccagaccattacgcgtcagaccgacgaactgaccggtctgtctagcctggtggttctggattccgcagaacgtaccgcaggtggtaaagatctgcgtccggcactgaaaatcgttgatgctcagggtaacgacgttctgatcccaggtaccgatatgccagcgcagtacttcctgccgggtaaagcgattgttcagctggaagatggcgtacagatcagctctggtgacaccctggcgcgtattccgcaggaatccggcggtaccaaggacatcaccggtggtctgccgcgcgttgcggacctgttcgaagcacgtcgtccgaaagagccggcaatcctggctgaaatcagcggtatcgtttccttcggtaaagaaaccaaaggtaaacgtcgtctggttatcaccccggtagacggtagcgatccgtacgaagagatgattccgaaatggcgtcagctcaacgtgttcgaaggtgaacgtgtagaacgtggtgacgtaatttccgacggtccggaagcgccgcacgacattctgcgtctgcgtggtgttcatgctgttactcgttacatcgttaacgaagtacaggacgtataccgtctgcagggcgttaagattaacgataaacacatcgaagttatcgttcgtcagatgctgcgtaaagctaccatcgttaacgcgggtagctccgacttcctggaaggcgaacaggttgaatactctcgcgtcaagatcgcaaaccgcgaactggaagcgaacggcaaagtgggtgcaacttactcccgcgatctgctgggtatcaccaaagcgtctctggcaaccgagtccttcatctccgcggcaagcttccaggagaccactcgcgtgctgaccgaagcagccgttgcgggcaaacgcgacgaactgcgcggcctgaaagagaacgttatcgtgggtcgtctgatcccggcaggtaccggttacgcgtaccaccaggatcgtatgcgtcgccgtgctgcgggtgaagctccggctgcaccgcaggtgactgcagaagacgcatctgccagcctggcagaactgctgaacgcaggtctgggcggttctgataacgagtaatcgttaatccgcaaataacgtaaaaacccgcttcggcgggtttttttatggggggagtttagggaaagagcatttgtcagaatatttaaggaatttctgaatactcataatcaatgtagagatgactaatatcctgaaactgactgaactaattgagtcaaactcggcaaggattcgatactattcctgtgtaactttcttaaggaacgagaatgaaacaggaagtggaaaagtggcgaccttttggacatccggatggtgatattcgtgatttaagttttcttgatgctcatcaggctgtctacgttcagcatcatgagggcaaagagcctttagagtatcgcttttgggttacctactctcttcactgcttcacaaaagattatgaacatcagacgaacgaagaaaaacaaagcttaatgtaccacgcgcctaaagaatctcgtcccttctgccagcaccgttataacttagcgcgcacacacttaaaaagaactattttggcgctgccagaaagcaacgttattcatgccgggtatggtagctatgccgtgattgaggtggacttagacggaggagataaggcattttactttgttgcgttcagggctttcagggaaaagaaaaaactccgtttgcatgtaactagcgcttatcccatttctgaaaaacagaaaggtaaaagtgtgaaatttttcaccattgcctacaacttattgagaaataagcagcttcctcagcccagtaaataacaaaacccaccttaaggtgggtttcgccagagaattatctctggtattcagaacgccattaccggactttgccttgaccttgcgataatcgcaggttgcgggatgtctgaatttcttcagtctgctgcatcctggaagatgagaacatgtgttcttattttcgtctctatcatagttgagtatttactctcttacaatcagatctctttcattgctcaacaggcgatggcttcagactttgcattacggaatttttaagaaaggcagggcgaaacgaggaagaagcttttcgccctggacaacattcctgctgacggcactaccataaaaaaacacaacgctttcaacaaccttgcgtttttcatcttccgtagcggctcggaataaatttacgttcttacattccgtctcatagtctttggctggcgcgtcccagatagctgtcccagtctttccataccggctgcaaaccctgagcggttaacgcggcagcaaccgcttccggtctgcgatcgtcgtgcggactgaactgttccaactcggggtgattatcggcatagccacctggctgcgttttgctgaaggcgctgacgttattgatcgccagcggaataacgcgatcgcgaaaccacggactttcccgcgtggagagactcagttcaatctccggtgcaagcagtcggaaggcgcagatggtttgcactaactggcgttcatccataatgctcgcaggctcaatgccgccagtacacgggcgcaggcgcggaaaggagacagagtaacggctttgccagtaatgctgttgcagccatagcaaatgttcggcaaccatatagctgtcaacgcgccagttgtcggaaaggccaattagcgcgccgaggcctatcttatcaatccccgcacgccccagccgatccggcgtttccagccgccagaagaagtcctgttttttgcctttcagatgatggcgggcataagtcgcctcgtgatatgtctcctgataaaccatcacgccatccagaccaagttgctttaactcggcgtattccgtctccgccagcggttgcacttccatctgtagactagagaactgttcacgaagggcagggagatgacgacgaaagtaatccatccccactttcgcctgatgttcaccagtgactaacagcagatgttcaaagcccatctcccgtatagcggcactttccctggcaatatccgcttcatccagcgttttgcgcttgatgcgattactcatggaaaatccacagtacgtgcagtcgttagcgcaaagattggaaagataaagcgggacgtagaaactaactgtgttgccaaatcgctgacgggtcagacgctgcgcccgttgggccagttgttccagatagccactggcggcagggcttaacagcgccatcatgtcgtcgcgggtgagttggctggcatttagcgcccgctctacgtcagcagccgttttgccgttgatacgcaggcggatgtcgtcccagtccagttgtcgccagcgatcgctgaaggttttcatgcgcttgcctccagaaatccggtcagcgggctggtggcatgagcaaaataactgcggctgcccggtccggactgacgtgccagtaggcctgcttctaccgccagacgaaatgccttcgccatgttgacgggatcgtccgcgacggcaatcgccgtattcactaacaccgcgtcggcccccatttccagcgcctgcgcggcatggctgggaacgccgatgccagcatcgacaaccaccggcactgtggcctgctggataataatctccagcatggcgcgggtttccagtccctgattgctgccaatcggcgcgccgagcggcatcaccgctgcacagccgacttcttccagacgtttacacaataccggatcggccccgcagtaaggcagcacgacaaatccctgttgtaccagcgtttcggcggctttcagggtttcgatgggatcgggcaacagccagcgggcgtcagggtgaatctctaattttaaccagtttgtgcctaacgcttcacgagccagatgggcggcgaaaatggcttcttccgctgttttcgccccggatgtatttggcagcagggtcacacccgccgcgataagcggttcgaggatagcgtcgttgtgctggcgcaagtcgacacgtttcatcgccagtgtcaccagctggctgccggaagcgcggatcgcctccaccatcagttgactagaagcgaatttccctgtgccggtaaacagatgactatcaaacgttttgtccgcaatacgtaacatttcaaccccctgcaataacctgaaaaagcaggatctggtcgccatcctgcacgatatgttgcgcccactgctcacgcgggacgatttgctgattaatcgccagagccgcgcccgcttgtcgttggtcgagttgctccagtagttcgtgaacagtttgcccggcggcgcactgcatcgcttgatcgttaaacaggatctgcattgcttcctccgcataccgggcaaccactggcgcggcgcaacgccaggctgcgccactggctgcttttaccgtcgaacagtcggagttctcccgcaggtgtctctataccgcttaataacttaatggcttccagtgcctgcaaagtgcccataaccccgaccaccgggccaaccacgcccgccgtgcggcagttgcgttctggctcctggttatctggccacaggcagcggtaacacccctgctcccagggcggcgtcagtaccatcaactgaccgccaaatccgaccgcgctggcggtgataagcggcgtgttgagtgccacgcaggcggcattaatctcctggcgagtcgccatattgtcggtacagtcgagcaccacatcggcccgtgcaaccgcatcttttaacgcctcacccgttaaccgttgttgtaatgctgtcagttgaatgtcgggattcaactgtgtcagtcgctgttggctgacctggcttttcgggcgatcgatatcttcagtggtaaagaggatttgtcgttgcagattgcttaaatgcacatcgtcgtcatctgccagtaccagcgtcccgacgccagcgcccgccaggtacagcgcagcaggtgtacccagcccgcccagaccgataatcagcacctggctgtcgagcagtttttgctgcccgtccagagcgatatcgtcgagcaggatttggcggctataacgcataaagtcacggtcattcatcgccaactcctgcaatttccagcaactgtgccgttgccaaacgccagtctgcggcttgagtaatggcgctgacgacggcgatactgccgacacccgttgctatcaccgcaggcgcgcgtgccagactgataccgccaatcgccacggtgggataatccgccagtcgctcaacatgccgtgccagctgttccagcccctgcggtgcagaaggcatctgtttggtttgcgtcgggaacacatgtcccagcgcgatataagaggggcgtgctgccagcgcgacgtcgatttccatatcgtcatgtgtgctaacgcccagccgcaggcctgccgcgcggatggcattgagatcggtggcttgcaaatcttcctgccccaaatggacgccatacgcctgatgcttgatcgccagccgccagtaatcgttgataaacaatcgcgcgttatagcggcggcccagcgcaattgccgccacgacatcggcttccacctcttcatcgcgccgatctttgatgcgtagctggagagtacgtacgcctgcatccaacagacgttcgatccactgtacgctgtccaccaccgggtacagtccactacgaaaaggtacaggaggaaaatcaggctgatacatcacgcttcctccttacgcaggtagatttctccgcctctggcacggaagttctcgctcatatccgccattcccatttcaatagtttgcgtggcggcgtaatcacgcacttcctggctgattttcatgctgcagaatttcggcccacacatggagcaaaaatgggcgactttaccactctcttgcggcagggtttcatcgtgataagcgcgggcggtaaacgggtcgagggccagattaaactggtcttcccagcgaaattcgaagcgggctttgctcatggcgttatcgcgaatttgcgcgcccggatgccctttcgccaggtcagcggcgtgggcagcaatcttataggtgataagcccctgcttaacatcttctttattgggcagacccagatgctcttttggcgttacgtaacagagcatcgcgcagccaaaccagccaatcatcgccgcaccaatcccgctcgtgaagtggtcatagcccggcgcaatatcggtagttagcggccccagagtgtaaaacggcgcttcgtggcagtgctctaactcctcggtcatattgcggcggatcatctgcatcggcacgtggcctgggccttcaatcatcacctgcacgtcatattcccaggcaattttggtcagttcgcccagcgtatgcagctcggcaaactgcgcttcatcgttggcgtcctgaatagaaccggggcgcagaccgtcgcccaggctcaggctaacgtcataagcggcacagatttcacaaatttcgcggaagtgttgatagaggaaattttcctgatgatgggagaggcaccatttcgccataatgctaccgccgcgagagacgataccggtcaggcgtttcgcggtcatcggcacatagcgcagcagtacgcccgcatggatagtgaagtaatccacaccttgctcggcctgttccagcagcgtgtcgcggaacgcttcccaggtaagatcttcggcgatcccgttaaccttctccagcgcctggtagatcggcactgtaccgatcggcaccgggctgttacgcaaaatccactcgcgggtttcgtgaatatagcgaccggtggagagatccatcaccgtatccgctccccagcgcgtggaccataccagcttttccacttcttcttcgatggaagaggtgaccgcgctgttgccgatattggcgttaacttttaccaggaaattgcgaccaataatcatcggctcgctttccggatgattaatgttggccgggataatcgcacgtccggcagcaacttcatcacggacaaattccgcagtgatattttccggcagatgtgcgccaaagctcattcccggatgctggtggcgtaaaacctcgctacggatgcgctcgcggcccatattctcgcggatggcgatgaattccatttccggcgtgatgatgccctggcgggcgtagtgcagttgggtgacacggcgtcctgctttggcgcgttttggtgttagtacgccgctaaaacgcagttcgtcgaggccatcatctgccagccgcgctttagtgtaatcggaactgcgcacggtaagttcttcggtatcgccgcgcgcatcgatccacggctggcgtagttttgccagcccttgctgcacgttaatggcaatctgcggatcaccatacgggccggaggtgtcgtagaccggaatcgcttcgttttcttcgtactgcggctgttctttgctaccgccaattagcgtcgggctaagctggatctcacgcatcggcacgcgcacgccggggtgtgtgccagtgatataaatgcgtttactgttgggaaaggcggtgccttccagggtgtcgataaaatgttgggcccgggcgcgttgttcgcggcgggtcagttttgttgcagacatagctcattccaaaaagttaaggacgtggcttgtcagacgacggatgaagcaagagacgatcgccgcaggggcgatgcgatagcagattaactcttgttcccttcgcaggtattagcctgatcaggttccgcggatcccgaataaacggtctcagccagttaaggcactccgacaagaaattagccccgcaaatggggcattgaatgtaaattacgcgttaacagcgcagaactcaagcaggatgtttgacgcgggcggcgtcaagcaccagcagaatcagcttatcttccagcacaaagcgcgcttccagcgcctcgccgatgtcagataaaacctgttgaaactcaaggtaattatcatgatcgatggcggtttccagactggaatcgtagtaatccataatctgttgagtattggcttcgagttgcggccaaatcttcgcggcgcgcgcgagttgcccgttgccttccagcttatgaagaatgcgctcataaatactgaaatgtccggcagacaagtaatcgaccaggctctgacaaaaatcatcaagggctttttcgtttagcctcatgtagctttctttgccaggcttaatgccaaccagattgtagtaagccacgagcagatgcttacgtacatgtagccagcgatcaaccagtttgttacttcctctgacgcgctccgtcaggttatcgagctggttaagcatgattgactccgcaagtttgtattcaaaaactgctcagtgagaaatgtaaaaaccatgttaaacatgccagtgatgcaaaggtagtgcaagagctatggatcgtataattgaaaaattagatcacggctggtgggtcgtcagccatgaacaaaaattatggttgccgaagggagaattgccatatggcgaagcggcaaatttcgatcttgtgggtcagcgcgcactacaaatcggcgaatggcagggggaacctgtttggttagtacaacagcagcggcgtcacgatatggggagcgtacgtcaggtcattgatctcgatgttgggctgtttcaactggccggacgaggcgtacaactggcggagttttaccgaagccataaatactgtggttactgcgggcatgaaatgtatccgagcaaaaccgaatgggcgatgctgtgcagccattgccgtgagcgttactacccgcaaatcgccccctgcattattgttgccatccgtcgcgatgatagcatcctcctcgcccagcatacccgccatcgtaacggtgtccatacagtacttgccggattcgtcgaagtgggcgaaaccctcgagcaggcagtcgcgcgggaagtgatggaagagagcggaattaaagttaaaaacttgcgttacgtgacttctcagccgtggccgtttcctcagtctttaatgaccgcgtttatggcggaatatgacagcggcgacatcgtgatcgacccgaaagaattgctcgaggcgaactggtatcgctatgacgatttgccgttactcccgccgcccggcaccgtagcgcgccgtctgatagaagatacggtggcgatgtgtcgggcagagtatgagtgatgatacactgaccgcctgacgcactaaggaacagccaaaatgaccgaacttaaaaacgatcgttatctgcgggcgctgctgcgccagcccgttgatgtcactccagtatggatgatgcgccaggcgggtcgctatctaccggaatataaagccacgcgcgcccaggcaggcgattttatgagcctgtgcaaaaacgccgagctggcgtgcgaagtgactttgcaaccgctgcgtcgctacccgctggatgcggcgatcctcttttccgatatcctcaccgtgccggacgcgatggggttagggctctattttgaagccggagaaggtccgcgttttaccagcccagtcacctgcaaagctgacgtcgataaactgccaattccggacccggaagatgaactgggttacgtgatgaacgcggtgcgtaccattcgtcgcgaactgaaaggcgaagtgccgctgattggtttttccggcagcccgtggacgctggcgacctacatggtggaaggcggcagcagcaaagccttcaccgtgatcaaaaaaatgatgtatgccgatccgcaggcgctgcacgctctgctcgataaactggcgaaaagcgtcactttgtatctgaatgcgcagattaaagccggtgctcaggcagtgatgattttcgacacctggggcggcgtgcttaccgggcgcgattatcaacagttcagcctctattacatgcataaaattgttgatggtttactgcgtgaaaacgacggtcgccgcgtaccggtcacgctgtttaccaaaggcggcggacagtggctggaagccatggcagaaaccggttgcgatgcgctgggcctcgactggacaacggacatcgccgatgcgcgccgccgtgtgggcaataaagtcgcgttgcagggtaatatggatccgagcatgctgtacgcgccgcctgcccgcattgaagaagaagtagcgactatacttgcaggtttcggtcacggcgaaggtcatgtctttaaccttggtcacggcattcatcaggatgtgccgccagaacatgctggcgtgttcgtggaggcagtgcatcgactgtctgaacagtatcaccgctaaggagtgattatggatctcgcgagtttacgcgctcaacaaatcgaactggcttcttctgtgatccgcgaggatcgactcgataaagatccaccggatctgatcgccggagccgatgtcgggtttgagcagggcggagaagtgacgcgagcggcgatggtgctgctgaaatatcccagccttgagctggtcgagtataaagttgcccgcatcgccaccaccatgccttacattccaggttttctttccttccgcgaatatcctgcgctgctggcagcgtgggagatgctgagccaaaagccggatttagtgtttgtcgatggtcatgggatcagccatcctcgccgtcttggcgtcgccagccattttggcttattggtggatgtgccgaccattggcgtggcgaaaaaacggctctgcggtaaattcgaaccgctctccagcgaaccgggcgcgctggccccactgatggataaaggcgagcagctggcctgggtctggcgcagcaaagcgcgctgtaacccgttgtttatcgctaccggccatcgggtcagcgtggacagcgcgctggcgtgggtacaacgctgcatgaaaggctatcgtctgccggagccaacgcgctgggcggacgcggtggccagcgaacgtccggcgttcgtgcgctatacagcaaatcagccctaattcaggtaaactgcggataatttccgtatttgagaactcaacatgttacaaaacccaattcatctgcgtctggagcgcctggaaagctggcagcatgtcactttcatggcttgcttatgcgaacgcatgtaccccaattacgccatgttctgccagcaaaccggttttggtgatgggcaaatttaccgtcgcattctcgatctcatctgggaaacgctgaccgttaaagacgcaaaagtaaatttcgacagccaactggagaaatttgaagaagcgattcctagtgccgacgatttcgatctgtacggcgtttatccggcaatcgatgcctgcgtggcgttaagtgaactggtccatagccgtttgagtggtgaaacgctcgaacacgcggtggaagtgagtaagacctccatcacgaccgttgcgatgctggaaatgactcaggctggtcgcgaaatgagcgatgaagagcttaaagaaaacccagctgtagagcaagaatgggacattcagtgggaaatattccgacttttagctgagtgcgaagaacgcgatatcgagctgataaaaggccttagggcagacctgcgtgaggcgggtgagagcaatattggtataatttttcagcaataagaccagaaaacgtgatttaacgcctgatttgtcgtacctggagtcttccctttcgccccccgtctggtctacatttggggggcgaaaaaaagtggctatcggtgcgtgtatgcaggagagtgctattctggcatttccgtcgcactcgatgcttagcaagcgataaacacattgtaaggataacttatgaacaagactcaactgattgatgtaattgcagagaaagcagaactgtccaaaacccaggctaaagctgctctggagtccactctggctgcaattactgagtctctgaaagaaggcgatgctgtacaactggttggtttcggtaccttcaaagtgaaccaccgcgctgagcgtactggccgcaacccgcagaccggtaaagaaatcaaaattgccgcagctaacgtaccggcatttgtttctggcaaggcactgaaagacgcagttaagtaagattgcgtggcagtgaacagttttaacgaaggggtggttagtccccttttgtctttctggcgtcgaagtttgatgctggctggcgctctgcttctcactgcctgtagtcataactctagtcttcctccctttaccgccagtggatttgctgaagaccagggcgcggtacgcatctggcgaaaagacagcggcgataatgtgcatctgcttgccgtgtttagcccgtggcgcagtggcgataccacgacgcgagagtatcgctggcagggcgataacctcacgctcatcaatatcaatgtttacagcaaaccgccggtgaatattcgcgcgcgttttgacgatcgcggtgatctgagctttatgcaacgtgaatccgatggggaaaagcagcagctttctaacgaccaaatcgatttataccgttatcgtgctgatcagatccgccagattagcgatgccttacgtcaggggagagtcgtgctgcgccaggggcgctggcatgcgatggaacagaccgtgaccacctgcgaagggcaaaccattaaacctgatttagatagccaggcgatagcgcatatcgagcgccgccagagccgctcttctgttgatgtcagcgtggcatggctggaagcgcccgaaggtagccaattactgttagtggcaaactctgatttctgtcgctggcaacccaacgagaaaacgttctgatttaccagtggcccatacccatatgaccgccaccaccgcagccgccgtagcccatgcccattccggctccgcgcggaatacccgcttcagccatcgcgatatctcgtttcacccgtaactcatctaagctctgacgcaaattctccatctctttggcgaccgcgttaattttgctgctatccggtgggttcgcggctaacagggcattgtattcataacgcttcgtcaccagttgctgttgcagtgcgctgctttgagcgtaaaagtcattatggattttctgccacgctgtctgttgttcgctggtcaaaggcgcggcattttgctgccacataccgtgtccgccgtgagcaaatgcagatgtgcttcccatcgccattgcactaagcgccatcattaccagggcaattttcgtgttccgtttcatggttaatcctccagtggttgtcttacttcgggtattgcatcttccgtgccaacgatgaaacgctgatatgacgggtaatctggcatgataaacgagtaaaaatgactcgcctgctgcgggtagcgagtcatttttactcattgaaacttaagcctttgtgttacagcgcagggtaagcgctgataaaagatggcatgatttctgctgtcagaaagggatgagcaggcaaagaagaagatgcgttttatgcaacgttctaaagactccttagctaaatggttaagcgcgatcctccccgtggtcattgttgggctggtgggattgtttgcggtaactgtgattcgtgattatgggcgggcaagcgaggcagaccgccaggcattactggaaaaaggtaatgtgcttatccgcgctctggagagcggaagccgcgtagggatggggatgcgaatgcaccatgtacagcaacaggcgcttctggaagagatggcgggacagccgggagtgttgtggttcgcagtcaccgatgcgcagggcatcattattcttcatagcgaccccgataaggtcgggcgtgcgctctatagcccggatgaaatgcagaaattaaagccagaggaaaactcccgctggcggctgcttgggaaaacggaaactacgcctgcacttgaggtctatcgtttgttccagccaatgagtgcgccctggcggcatggaatgcacaatatgccgcgctgtaacggcaaagctgtgccacaagtagatgcacaacaggctatttttatcgccgttgatgccagtgatctggttgcaacccagagtggggaaaagcgcaataccctgattatcctcttcgccctggcgacggtcttgctggcaagcgtattgagtttcttctggtatcgccgctatctgcgcagccgccagcttctacaagatgaaatgaagcgcaaagagaagctggtggcgctggggcatcttgcggcaggcgttgcccacgaaatccgtaacccactttccagcattaaaggactggcgaaatactttgccgagcgcgcgcctgcagggggagaagcgcatcaactggcgcaggtgatggcgaaagaggccgaccgtttaaaccgcgtggtaagcgagttgctggaactggttaagccaacgcatctggctttgcaggcggtggatctcaacacgctgattaaccacagtttacagctggtaagtcaggatgcaaacagccgggagatccagttacgctttaccgccaacgacacattaccggaaattcaggccgacccggacaggctgactcaggtcctgttgaatctctatctcaatgctattcaggcgattggtcagcatggcgtgattagcgtgacggccagcgaaagcggcgcgggcgtgaaaatcagcgttaccgacagcggtaagggaattgcggcagatcagcttgatgccatcttcactccgtacttcaccactaaagccgaaggcaccggattggggctggcggtcgtgcataatattgttgaacaacacggtggtacaattcaggtcgcaagccaggagggaaaaggcagtacgttcaccctctggcttccggtcaatattacgcgtaaggacccacaaggatgacgcacgataatatcgatattctggtggtggatgatgacattagccactgcactattttgcaggctttactgcgcggctggggctataacgtcgcgctggcgaacagcgggcgacaggcgttggagcaggtgcgggaacaggtttttgatcttgtgctttgcgatgtgcgaatggcggagatggacggcatcgccacgctgaaagagatcaaagcgttaaacccggcaattccggtgctgattatgactgcgtactccagcgtcgagacggcggtagaggcactgaaaactggggcgctggattatctcatcaagccgctggatttcgataacctacaggcgacgctggaaaaagcgctcgcgcatacgcacagtattgatgctgaaacacctgcggtgactgccagccagttcggtatggtcggtaaaagcccggcgatgcaacacctgctcagtgaaatcgccctcgtcgcgccaagcgaagccacggtactgatccacggcgattccggcaccggtaaagagctggtcgccagggcgattcacgccagtagcgcacgtagcgaaaaaccgctggtaacgctcaactgtgcggcactcaacgaatccttgctggaatctgaattgttcggtcacgaaaaaggggcgtttactggagccgataaacgccgggaagggcgctttgttgaggcggacggcggcacgctgtttctcgatgaaattggcgatatcagcccgatgatgcaggtgcgtctgctgcgtgcgattcaggagcgcgaagttcagcgtgtcggtagcaaccagattatcagcgttgatgtccggctgattgcggcgacccatcgcgatcttgccgcagaggtgaatgccgggcgttttcgccaggatctctactatcgcctgaatgtggtggcgattgaagtaccaagcctgcggcaacggcgggaagatatccctctgctggctggccattttctgcagcgctttgccgagcgtaatcgcaaggcggtaaaaggttttacgccccaggcgatggatctgttgattcattacgactggccgggaaatattcgtgagctggaaaacgcggtggaacgggcagtggtgctgctgaccggggaatatatttccgaacgcgagctgccgctggcgattgccagtacgccgatcccgctgggacaaagtcaggatattcagccgttggtggaagtggaaaaagaggtgattctggcggcgctggagaaaacgggcggcaacaaaaccgaagccgcccgtcagttagggatcacgcgcaaaacgctattggcaaaactgagccgttaattctgctcgcgttcgatagcgcgccagccgatatctttccggcagaagcagtcgtcccagtggatatcggtcattaaggcataggcgcgtttctgcgcttctgccacggtatgacccagcgcggtgacgcacagtacgcgcccgccgttggtcactacctgctcgtcatccgccagttttgtgcccgcgtggaacactttgccgcctgccacttcttccagcggcaggccgtggatcacgtcaccggtgcggtaatcacccggatatccacccgcagccatcaccacgccgagagaagcgcgttcatcccactcggacgttttctcgtccagtttgctttcacaggccgccaggcagagctcaaccagatcggacttcatgcgcagcataatcggctgggtttccggatcgccaaagcggcagttaaattcaataaccttcggattgccctgtttgtcgatcatcaggcccgcgtagagaaaaccggtgtaggtgttgccttccgccgccatgcctttcacggttggccagataatacgttccatggtgcgctgatgaacgtcatcggttactaccggcgcgggggagtaagcgcccatcccgccggtgtttggtccggtatctttatcgcctacgcgtttgtgatcctggctggtagccatcggcagcacatgctcgccgtccaccatcacgataaagctcgcttcttcgccatcgaggaactcttcgataacgatgcgatgacccgcgtcgccaaaagcgttgcccgccagcatatcgtgaacagccgcttccgcttcttccagcgtcatcgccacgataacgcctttcccggcagccagaccgtccgctttaatgacgattggcgcgcctttctcacgcagatacgccagcgcaggttctacctcggtgaagttctggtattccgccgtagggatcttatggcgggccaggaaatctttggtaaacgctttactgccttccagttgggccgcacctgcggttgggccgaagattttcagcccggcggcgcggaaggtatcgaccacgcctttcaccagcggcgcttccgggccgacgatggtcagatcaatcttttcgttttgtgcgaaatccaacagcgccgggatatcggtcacgccaatagcaacgttttgcagcgcgggttccagtgcagtgcctgcattacccggagcaacaaaaacagtctcaaccagcgggctctgggccgctttccaggccagcgcgtgctcgcgcccgccgttaccaatcactaatactttcatctattgctccattaatggcggaagtggcgcatgtcggtgaagagcatcgcaataccgtgctcgtcggcggcggcaatcacttcgtcatcacggatagaaccgccaggctggattacgcaggtcacgcccgcagcggcggcggcatcaataccgtcgcggaacgggaagaacgcgtcagaagccatgctggaacctttcacttccaggccttcatcggccgctttaataccggcgatttttgcggagtacacgcggctcatctggcccgcgccaatgccgatagtcatattgtttttggcatagacgatagcgttggatttcacaaacttcgccaccttccagcagaacagcgcatcacgcagttcctgttcgctcggctgacgtttggtcaccacgcgcagttcttccgcaccgaccatccccaggtcacgatcctgaaccagcagaccgccgttcacgcgtttgaaatcgaggcccggaacacgctcgccccactgaccgcaggtcagaacgcgtacgttctgtttggcggcggtgattttcagggcttcttcgctggcggacggcgcaataatcacttcgacaaactgacgagaaatgatggcctgtgcggtttccgcatccagctcgcggttaaaggcaatgatgccgccgaatgcggaggttgggtcggttttgtacgcgcgatcgtaagcatcaagaatggaattgccgatagccacgccgcaagggttggcgtgcttcacaatcacacatgccggctcggcgaactctttcacgcactccagcgccgcatcggtatcggcgatgttgttataagagagggctttaccctgaacctgggttgcggtagcaacggaggcttctttcacattctcttctatatagaaggcagcctgctggtggctgttctcgccgtaacgcatatccagcttcttaatgaagttcaggttcagcgtgcgtgggaagcgaccggcggcttctttgctttcaccgtggtaagccggaaccatgctgccgaagtagttggcaatcatgctgtcgtaggcggcagtgtgttcgaaggctttgatggcgaggtcgaaacgggttgcaagcgtcaggcttccttcgttgtcatccatctctttaataatggcgtcatagtcgctgctcttcaccacgattgcgacatctttatggttcttggcggcggagcgcaccatcgttgggccgccgatatcgatgttctcaaccgcatcttccaggctgcaaccttcacgggccacggtctgggcgaacggatacaggttaacaaccaccatatcgataggctggatctgatgttcttccataatggcatcgtcctggccgcgacggcccagaatgccaccatgtactttcggatgcagggtcttcacgcgtccatccatcatctccgggaaaccggtgtaatcggaaacttcggttaccggcagacctttttctgctaacagacgggcagtgccccctgtagacagcagctccacaccgcgtgcggaaagtgcctgggcgaattcgacgataccggctttgtcagaaacactgagcagagcgcggcggactggacgacgttgttgcatggtaaatcccctggatttgactattacagagagcgttagctgaatttttcgcgaaaaactcagctaacgcccctaacggggcatccttatttttcgcccgcattgtaacgaaaacgtttgcgcaacgctcgcgaatttttctctttcaatggtgatcacaattttgactgtggttaccgtgggcaaaatacagaaattacattgatgattgtggataactctgtgcgtaaaaaggtataaagcgggcttttgctggggaatgcagcagtcagtcatttttctgcaatttttctattgcggcctgcggagaactccctataatgcgcctccatcgacacggcggatgtgaatcacttcacacaaacagccggttcggttgaagagaaaaatcctgaaattcagggttgactctgaaagaggaaagcgtaatatacgccacctcgcgacagtgcgctaaagcgcgtcgcaactgctctttaacaatttatcagacaatctgtgtgggcactcgaagatacggattcttaacgtcgcaagacgaaaaatgaataccaagtctcaagagtgaacacgtaattcattacgaagtttaattctttgagcatcaaacttttaaattgaagagtttgatcatggctcagattgaacgctggcggcaggcctaacacatgcaagtcgaacggtaacaggaagaagcttgcttctttgctgacgagtggcggacgggtgagtaatgtctgggaaactgcctgatggagggggataactactggaaacggtagctaataccgcataacgtcgcaagaccaaagagggggaccttcgggcctcttgccatcggatgtgcccagatgggattagctagtaggtggggtaacggctcacctaggcgacgatccctagctggtctgagaggatgaccagccacactggaactgagacacggtccagactcctacgggaggcagcagtggggaatattgcacaatgggcgcaagcctgatgcagccatgccgcgtgtatgaagaaggccttcgggttgtaaagtactttcagcggggaggaagggagtaaagttaatacctttgctcattgacgttacccgcagaagaagcaccggctaactccgtgccagcagccgcggtaatacggagggtgcaagcgttaatcggaattactgggcgtaaagcgcacgcaggcggtttgttaagtcagatgtgaaatccccgggctcaacctgggaactgcatctgatactggcaagcttgagtctcgtagaggggggtagaattccaggtgtagcggtgaaatgcgtagagatctggaggaataccggtggcgaaggcggccccctggacgaagactgacgctcaggtgcgaaagcgtggggagcaaacaggattagataccctggtagtccacgccgtaaacgatgtcgacttggaggttgtgcccttgaggcgtggcttccggagctaacgcgttaagtcgaccgcctggggagtacggccgcaaggttaaaactcaaatgaattgacgggggcccgcacaagcggtggagcatgtggtttaattcgatgcaacgcgaagaaccttacctggtcttgacatccacggaagttttcagagatgagaatgtgccttcgggaaccgtgagacaggtgctgcatggctgtcgtcagctcgtgttgtgaaatgttgggttaagtcccgcaacgagcgcaacccttatcctttgttgccagcggtccggccgggaactcaaaggagactgccagtgataaactggaggaaggtggggatgacgtcaagtcatcatggcccttacgaccagggctacacacgtgctacaatggcgcatacaaagagaagcgacctcgcgagagcaagcggacctcataaagtgcgtcgtagtccggattggagtctgcaactcgactccatgaagtcggaatcgctagtaatcgtggatcagaatgccacggtgaatacgttcccgggccttgtacacaccgcccgtcacaccatgggagtgggttgcaaaagaagtaggtagcttaaccttcgggagggcgcttaccactttgtgattcatgactggggtgaagtcgtaacaaggtaaccgtaggggaacctgcggttggatcacctccttaccttaaagaagcgttctttgcagtgctcacacagattgtctgatagaaagtgaaaagcaaggcgtcttgcgaagcagactgatacgtccccttcgtctagaggcccaggacaccgccctttcacggcggtaacaggggttcgaatcccctaggggacgccacttgctggtttgtgagtgaaagtcacctgccttaatatctcaaaactcatcttcgggtgatgtttgagatatttgctctttaaaaatctggatcaagctgaaaattgaaacactgaacaacgaaagttgttcgtgagtctctcaaattttcgcaacacgatgatgaatcgtaagaaacatcttcgggttgtgaggttaagcgactaagcgtacacggtggatgccctggcagtcagaggcgatgaaggacgtgctaatctgcgataagcgtcggtaaggtgatatgaaccgttataaccggcgatttccgaatggggaaacccagtgtgtttcgacacactatcattaactgaatccataggttaatgaggcgaaccgggggaactgaaacatctaagtaccccgaggaaaagaaatcaaccgagattcccccagtagcggcgagcgaacggggagcagcccagagcctgaatcagtgtgtgtgttagtggaagcgtctggaaaggcgcgcgatacagggtgacagccccgtacacaaaaatgcacatgctgtgagctcgatgagtagggcgggacacgtggtatcctgtctgaatatggggggaccatcctccaaggctaaatactcctgactgaccgatagtgaaccagtaccgtgagggaaaggcgaaaagaaccccggcgaggggagtgaaaaagaacctgaaaccgtgtacgtacaagcagtgggagcacgcttaggcgtgtgactgcgtaccttttgtataatgggtcagcgacttatattctgtagcaaggttaaccgaataggggagccgaagggaaaccgagtcttaactgggcgttaagttgcagggtatagacccgaaacccggtgatctagccatgggcaggttgaaggttgggtaacactaactggaggaccgaaccgactaatgttgaaaaattagcggatgacttgtggctgggggtgaaaggccaatcaaaccgggagatagctggttctccccgaaagctatttaggtagcgcctcgtgaattcatctccgggggtagagcactgtttcggcaagggggtcatcccgacttaccaacccgatgcaaactgcgaataccggagaatgttatcacgggagacacacggcgggtgctaacgtccgtcgtgaagagggaaacaacccagaccgccagctaaggtcccaaagtcatggttaagtgggaaacgatgtgggaaggcccagacagccaggatgttggcttagaagcagccatcatttaaagaaagcgtaatagctcactggtcgagtcggcctgcgcggaagatgtaacggggctaaaccatgcaccgaagctgcggcagcgacgcttatgcgttgttgggtaggggagcgttctgtaagcctgcgaaggtgtgctgtgaggcatgctggaggtatcagaagtgcgaatgctgacataagtaacgataaagcgggtgaaaagcccgctcgccggaagaccaagggttcctgtccaacgttaatcggggcagggtgagtcgacccctaaggcgaggccgaaaggcgtagtcgatgggaaacaggttaatattcctgtacttggtgttactgcgaaggggggacggagaaggctatgttggccgggcgacggttgtcccggtttaagcgtgtaggctggttttccaggcaaatccggaaaatcaaggctgaggcgtgatgacgaggcactacggtgctgaagcaacaaatgccctgcttccaggaaaagcctctaagcatcaggtaacatcaaatcgtaccccaaaccgacacaggtggtcaggtagagaataccaaggcgcttgagagaactcgggtgaaggaactaggcaaaatggtgccgtaacttcgggagaaggcacgctgatatgtaggtgaggtccctcgcggatggagctgaaatcagtcgaagataccagctggctgcaactgtttattaaaaacacagcactgtgcaaacacgaaagtggacgtatacggtgtgacgcctgcccggtgccggaaggttaattgatggggttagcgcaagcgaagctcttgatcgaagccccggtaaacggcggccgtaactataacggtcctaaggtagcgaaattccttgtcgggtaagttccgacctgcacgaatggcgtaatgatggccaggctgtctccacccgagactcagtgaaattgaactcgctgtgaagatgcagtgtacccgcggcaagacggaaagaccccgtgaacctttactatagcttgacactgaacattgagccttgatgtgtaggataggtgggaggctttgaagtgtggacgccagtctgcatggagccgaccttgaaataccaccctttaatgtttgatgttctaacgttgacccgtaatccgggttgcggacagtgtctggtgggtagtttgactggggcggtctcctcctaaagagtaacggaggagcacgaaggttggctaatcctggtcggacatcaggaggttagtgcaatggcataagccagcttgactgcgagcgtgacggcgcgagcaggtgcgaaagcaggtcatagtgatccggtggttctgaatggaagggccatcgctcaacggataaaaggtactccggggataacaggctgataccgcccaagagttcatatcgacggcggtgtttggcacctcgatgtcggctcatcacatcctggggctgaagtaggtcccaagggtatggctgttcgccatttaaagtggtacgcgagctgggtttagaacgtcgtgagacagttcggtccctatctgccgtgggcgctggagaactgaggggggctgctcctagtacgagaggaccggagtggacgcatcactggtgttcgggttgtcatgccaatggcactgcccggtagctaaatgcggaagagataagtgctgaaagcatctaagcacgaaacttgccccgagatgagttctccctgactccttgagagtcctgaaggaacgttgaagacgacgacgttgataggccgggtgtgtaagcgcagcgatgcgttgagctaaccggtactaatgaaccgtgaggcttaaccttacaacgccgaaggtgttttggcggattgagagaagattttcagcctgatacagattaaatcagaacgcagaagcggtctgataaaacagaatttgcctggcggcagtagcgcggtggtcccacctgaccccatgccgaactcagaagtgaaacgccgtagcgccgatggtagtgtggggtctccccatgcgagagtagggaactgccaggcatcaaattagaaaaaccccggtccataaggccggggttttttgcatatcaattatttgcatgatgaagggaatctcatgagtgttctgtatatccaaattcgtcgtaatcaaattactgttcgcgatcttgaaagcaaacgtgaagtgagtggagacgctgccttcagtaaccagcgcctgttaatcgccaatttctttgttgcagaaaaagttctgcaagatcttgttctgcaactccacccacgtagtacctggcattcttttttgccagcaaaacgtatggatattgttgtgagcgcactggaaatgaatgagggcggtttgagtcaggttgaggaacgcattctccatgaagtggtcgctggggcaacgttaatgaaatatcgccagttccacatccatgcgcaaagtgcggtactcagtgatagtgcggtcatggcaatgcttaagcagaaataatcgtgtcaccattggtgggtactaaacctgaagttcagcccaccgggatgagaaaaaatcgcttacgcccccacatacgccagattcagcaacggatacggtttccccaaatcgtccacctcagagcgtcccgtaaccttaaaacccaccttcttatagaacccaaccgcctgctcattttgctcattaacgttggttgtcagttccggtgccatgctgagcgcatgctccaccagcacccgacctacgccgcagccgcgcacatcaggatcgataaacagcgcatccatatgctgcccacttagcaacataaatccaaccggctgatcccgctcattaaccgcgacccacaacggcgcttccggcaggaaggaacgaactaggtcctccagctcggtccgatactctgcacttagaaaatcgtgagtggcatcgacagaacgacaccaaatcgcaacgagttcctccccttcctcatgccgactgcggcgaatactaataaccattttctctccttttagtcattcttatattctaacgtagtcttttccttgaaactttctcaccttcaacatgcaggctcgacattggcaaattttctggttatcttcagctatctggatgtctaaacgtataagcgtatgtagtgaggtaatcaggttatgccgattcgtgtgccggacgagctacccgccgtcaatttcttgcgtgaagaaaacgtctttgtgatgacaacttctcgtgcgtctggtcaggaaattcgtccacttaaggttctgatccttaacctgatgccgaagaagattgaaactgaaaatcagtttctgcgcctgcttagtaacagtcctttgcaggtcgatattcagctgttgcgcatcgattcccgtgaaagccgcaacacgcccgcagagcatctgaacaacttctactgtaactttgaagatattcaggatcagaactttgacggtttgattgtaactggtgcgccgctgggcctggtggagtttaatgatgtcgcttactggccgcagatcaaacaggtgctggagtggagcaaagatcacgtcaccagcacgctgtttgtctgctgggcggtacaggccgcgctcaatatcctctacggcattcctaagcaaactcgcaccgaaaaactctctggcgtttacgagcatcatattctccatcctcatgcgcttctgacgcgtggctttgatgatagtttcctggcaccgcatagccgctatgctgactttccggcagcgttgattcgtgattacaccgatctggaaattctggcagagacggaagaaggggatgcatatctgtttgccagtaaagataagcgcattgcctttgtgacgggccatcccgaatatgatgcgcaaacgctggcgcaggaatttttccgcgatgtggaagccggactagacccggatgtaccgtataactatttcccgcacaatgatccgcaaaatacaccgcgagcgagctggcgtagtcacggtaatttactgtttaccaactggctcaactattacgtctaccagatcacgccatacgatctacggcacatgaatccaacgctggattaatcttctgtgatagtcgatcgttaagcgattcagcaccttacctcaggcaccttcgggtgccttttttatttccgaaacgtacctcagcaggtgaataaattttattcatattgttatcaacaagttatcaagtatttttaattaaaatggaaattgtttttgattttgcattttaaatgagtagtcttagttgtgctgaacgaaaagagcacaacgatccttcgttcacagtggggaagttttcggatccatgacgaggagctgcacgatgactgaacaggcaacaacaaccgatgaactggctttcacaaggccgtatggcgagcaggagaagcaaattcttactgccgaagcggtagaatttctgactgagctggtgacgcattttacgccacaacgcaataaacttctggcagcgcgcattcagcagcagcaagatattgataacggaacgttgcctgattttattagcgaaacagcttccattcgcgatgctgattggaaaattcgcgggattcctgcggacttagaagaccgccgcgtagagataactggcccggtagagcgcaagatggtgatcaacgcgctcaacgccaatgtgaaagtctttatggccgatttcgaagatagtctggcaccagactggaacaaagtgatcgacgggcaaattaacctgcgtgatgcggttaacggcaccatcagttacaccaatgaagcaggcaaaatttaccagctcaagcccaatccagcggttttgatttgtcgggtacgcggtctgcacttgccggaaaaacatgtcacctggcgtggtgaggcaatccccggcagcctgtttgattttgcgctctatttcttccacaactatcaggcactgttggcaaagggcagtggtccctatttctatctgccgaaaacccagtcctggcaggaagcggcctggtggagcgaagtcttcagctatgcagaagatcgctttaatctgccgcgcggcaccatcaaggcgacgttgctgattgaaacgctgcccgccgtgttccagatggatgaaatccttcacgcgctgcgtgaccatattgttggtctgaactgcggtcgttgggattacatcttcagctatatcaaaacgttgaaaaactatcccgatcgcgtcctgccagacagacaggcagtgacgatggataaaccattcctgaatgcttacagtcgcctgttgattaaaacctgccataaacgcggtgcttttgcgatgggcggcatggcggcgtttattccgagcaaagatgaagagcacaataaccaggtgctcaacaaagtaaaagcggataaaagcctggaagccaataacggtcacgatggcacatggatcgctcacccaggccttgcggacacggcaatggcggtattcaacgacattctcggctcccgtaaaaatcagcttgaagtgatgcgcgaacaagacgcgccgattactgccgatcagctgctggcaccttgtgatggtgaacgcaccgaagaaggtatgcgcgccaacattcgcgtggctgtgcagtacatcgaagcgtggatctctggcaacggctgtgtgccgatttatggcctgatggaagatgcggcgacggctgaaatttcccgtaccagcatctggcagtggatccatcatcaaaaaacgttgagcaatggcaaaccggtgaccaaagccttgttccgccagatgctgggcgaagagatgaaagtcattgccagcgaactgggcgaagaacgtttctcccaggggcgttttgacgatgccgcacgcttgatggaacagatcaccacttccgatgagttaattgatttcctgaccctgccaggctaccgcctgttagcgtaaaccaccacataactatggagcatctgcacatgaaaacccgtacacaacaaattgaagaattacagaaagagtggactcaaccgcgttgggaaggcattactcgcccatacagtgcggaagatgtggtgaaattacgcggtagtgtcaatcctgaatgcacgctggcgcaactgggcgcagcgaaaatgtggcgtctgctgcacggtgagagcaaaaaaggctacatcaacagcctcggcgcactgactggcggtcaggcgctgcaacaggcgaaagcgggtattgaagcagtctatctgagcggatggcaggtagcggcggacgctaacctggcggccagcatgtatccggatcagagcctctatccggcaaacagcgtgccagctgtggtggagcggatcaacaacaccttccgtcgtgccgatcagatccaatggtccgcgggcattgagccgggcgatccgcgctatgtcgattacttcctgccgatcgttgccgatgcggaagccggttttggcggtgtcctgaatgcctttgaactgatgaaagcgatgattgaagccggtgcagcggcagttcacttcgaagatcagctggcgagtgtgaagaaatgcggtcacatgggcggcaaagttttagtgccaactcaggaagctattcagaaactggtcgcggcgcgtctggcagctgacgtgacgggcgttccaaccctgctggttgcccgtaccgatgctgatgcggcggatctgatcacctccgattgcgacccgtatgacagcgaatttattaccggcgagcgtaccagtgaaggcttcttccgtactcatgcgggcattgagcaagcgatcagccgtggcctggcgtatgcgccatatgctgacctggtctggtgtgaaacctccacgccggatctggaactggcgcgtcgctttgcacaagctatccacgcgaaatatccgggcaaactgctggcttataactgcagcccgagcttcaactggcagaaaaacctcgacgacaaaactattgccagcttccagcagcagctgagcgatatgggctacaagttccagttcatcaccctggcaggtatccacagcatgtggttcaacatgtttgacctggcaaacgcctatgcccagggcgagggtatgaagcactacgttgagaaagtgcagcagccggaatttgccgccgcgaaagatggctataccttcgtatctcaccagcaggaagtgggtacaggttacttcgataaagtgacgactattattcagggcggcacgtctagtgtcaccgcgctgaccggctccactgaagaaagccagttctaagcaacaacaaccgttgctgactgtaggccggataaggcgttcacgccgcatccggcaatcggtgcacgatgcctgatgcgacgcttgcgcgtcttatcatgcctacagccgttgccgaacgtaggctggataaggcgtttacgccgcatccggcaattctctgctcctgatgagggcgctaaatgccgcgtggcctggaattattgattgctcaaaccattttgcaaggcttcgatgctcagtatggtcgattcctcgaagtgacctccggtgcgcagcagcgtttcgaacaggccgactggcatgctgtccagcaggcgatgaaaaaccgtatccatctttacgatcatcacgttggtctggtcgtggagcaactgcgctgcattactaacggccaaagtacggacgcggcatttttactacgtgttaaagagcattacacccggctgttgccggattacccgcgcttcgagattgcggagagcttttttaactccgtgtactgtcggttatttgaccaccgcagccttactcccgagcggctttttatctttagctctcagccagagcgccgctttcgtaccattccccgcccgctggcgaaagactttcaccccgatcacggctgggaatctctactgatgcgcgttatcagcgacctaccgctgcgcctgcgctggcagaataaaagccgtgacatccattacattattcgccatctgacggaaacgctggggacagacaacctcgcggaaagtcatttacaggtggcgaacgaactgttttaccgcaataaagccgcctggctggtaggcaaactgatcacaccttccggcacattgccatttttgctgccgatccaccagacggacgacggcgagttatttattgatacctgcctgacgacgaccgccgaagcgagcattgtttttggctttgcgcgttcttattttatggtttatgcgccgctgcccgcagcgctggtcgagtggctacgggaaattctgccaggtaaaaccaccgctgaattgtatatggctatcggctgccagaagcacgccaaaaccgaaagctaccgcgaatatctcgtttatctacagggctgtaatgagcagttcattgaagcgccgggtattcgtggaatggtgatgttggtgtttacgctgccgggctttgatcgggtattcaaagtcatcaaagacaggttcgcgccgcagaaagagatgtctgccgctcacgttcgtgcctgctatcaactggtgaaagagcacgatcgcgtgggccgaatggcggacacccaggagtttgaaaactttgtgctggagaagcggcatatttccccggcattaatggaattactgcttcaggaagcagcggaaaaaatcaccgatctcggcgaacaaattgtgattcgccatctttatattgagcggcggatggtgccgctcaatatctggctggaacaagtggaaggtcagcagttgcgcgacgccattgaagaatacggtaacgctattcgccagcttgccgctgctaacattttccctggcgacatgctgtttaaaaacttcggtgtcacccgtcacgggcgtgtggttttttatgattacgatgaaatttgctacatgacggaagtgaatttccgcgacatcccgccgccgcgctatccggaagacgaacttgccagcgaaccgtggtacagcgtcagcccgggcgatgttttcccggaagagtttcgccactggctatgcgccgacccgcgtattggtccgctgtttgaagagatgcacgccgacctgttccgcgctgattactggcgcgcactacaaaaccgcatacgtgaagggcatgtggaagatgtttatgcgtatcggcgcaggcaaagatttagcgtacggtatggggagatgcttttttgagtaaagcttccatataatttttctccgcaatgtatcgagggttatccgtaaagccaaagctttcagccatcttatttaatgtattaaggattaattcagcaataacccggtgaccaaattcaaaagccaactcaaaggcagagtatttttgtggggctttgtgttgccaaaaatccataatatcttcagcggtaaatccaaacaggcgtgcatggtcagataaagcaagataaaccgtctctacaacattttgttgtttatgctgtatcgcactaaacaaaccgggatattcattagaattatttgccaggaggaggggcttcatattttttttatcgaatttaaacgtattaaacagagtgggtaatgcgttaaaaatagtattaataacgttcatgtgtccgcgctgcatggccataaacaaacccgtgtcgcgcgcaagacttttagcggtcagaagatctacaatatcggaagcactaatgttaatttcctgggctaggctgggcaatgcttcaagaataactttcacgatatcgctatgtccattttgcatcgccagatatagtcctgggcaaccataaaaatcctttgccttcaggagatcgagtacctgttctttagtcaaatgacatgtgcgaattaacaaaggtaacgcgttcaaaacaattttcagcatgtcggcatcaccattcgccataacatggtataaaacatggctggacgttctatttttggcactcaggaatttatacacttgttcgttatctaaatgatgtgttgcggccagtttaggtaaggcgttcagaatgctggttacaacatttttatccttacgacttatcgctaaaaataatccagaaaaaccatttttatcttttgcctccagaatatgcatgagattttttttgctgagtaatccttcatatcctgtttcactcaaactattgaaaatagtctcaacgatatccgcattaccataatttatagccaaatataaacctggcaggttaatactattataggcagtcaacatttctgttctatgtagttctggcattttctggagttgaatcatcagttgcgtaagttggtgattctgaccaattgccattagcaaattcatcgttgcaggacttaatggaggggttatttcatccacagatccttttaacatcaatagctgttctttcggaagtgctggaattattgcaacagattgattaataacatgatcattactccatttcaggaggctataatctacattcataaaatccatcagagaatagtgtttaatattctctttgctttcgctcataattcttattttatcgttagttacattaggatcataaacgctaaccacgtaatgggtacatccttcagttgtgttctttattcttagccggaccgtcaaagcatggttatccaccagtaatatggctgccataacactgatgccattactttccatcttgtcaaaatatgctttcataactagcccgaaatcaccgcaggcagcaacgcaacgcccctcaggacggctggaaaccaacgccaaagtctggtttttgcattttttgttgaagtgcgtgagaaatttttcagcactagagtaatcatcttgatggggtttgtaatcaacattctgataaatatcattaatatattgtgcagcaatgtgtcggcatactatacggttttggggtcgccccggaaaataacattgaccattaagtttaattcttgggaattctttttcttttctatcactttttaggtttaattcttgtttatcaagagtgtcactgcgttgaggtaaaatttccattaggtatttttcaaatattggggcaatggtttgagtaagtgtcgtgttttcgtttttattaattatcgtaatttctttcttatcagcttgtaagacggacgtggaaaatttaatgacaaaatccttgttgctaaagatatgacgaccattttgtctacagttctcactgaagctttttaatagaggcgtcgccagctccttgccagaaaatttatcctcgagttctttataaaacaattcactcagggtttggtgttcatttgtctgggctgtattattaatatttgcagagaaagaactacgaggaatacgagtaatcatttaaatatctcattgtttattgatgtcttgaattttaactatcagaacagtgaaaaaatttaatatgattacaactaaagaaatatcataaatcgctcaatctcataatgcagccgtaaaagtttcggtggaatgagatcttgcgattttgttaataattaagtggtttgatgtttaaaaataatgctgagttaataaaagtgtgtgaagtgtatgacattaagttattttggcgtcaatgcgattaacagacacccttattctattgccactcaggtatgatgggcagaatattgcctctgcccgccagaaaaagtcagcgcattccaccgtacgccagcgtcacttccttcgccgctttaatcaccatcgcgccaaactcggtcacgcggtcatcggtaatacgactaatcggtccggaaatagaaattgcggcaaacggttcacggtgctcatcgaaaatacacgctgcaaggcaacgtagccccagtgcatgttcctcatcgtcaaaactataaccccgtttgcgcgtttgggcgagatcttcttttaaatgcacaggagacaccagcgttgcgtgggtataggcatgtaaccctttgcggtgcagcagcttcgtcacctgttcttcgctcagttgggctaaaaaggctttacccgcaccggaagcgtgcatcggcaatttaccgccgataggcgcggacattcgcatcagatgcgtacactgtacctggtcgataataatcgcttcgtgatcgctttgatcaagcaccgccatattgaccgtttcgccagactcttccattagattgcgcaggatagggtgaacaatcgctaacaaattacggctctggagaaagctgctgccgaccataaaggcatgtgcgccgattgcccaatgtcccagttcgccaacctgacgcacgaaaccctgctgttgcatcgtggttagcaggcggtgggtcgtggaattgggtaacccggcttgttgcgccagttccgtgagtgccacactgccattggattcggcaatccactccagtaatttcaggccacgcgttaaagactgaacctgtccagtcgctggtgcggtggcaacggcgggttttctgccgcgtttcgcgggaatgggtgcgaccatgacagtctcttttttctgtatcgtggaaatcattttcatttttattgttagctaatgcaatagttactgaactgatccgatgagttaatgttgaacaaatctcatgttgcgtggtggtcgcttttaccacagatgcgtttatgccagtatggtttgttgaatttttattaaatctgggttgagcgtgtcgggagcaagtgtgagcagcaaagtggaacaactgcgtgcgcagttaaatgaacgtattctggtgctggacggcggtatgggcaccatgatccagagttatcgactgaacgaagccgattttcgtggtgaacgctttgccgactggccatgcgacctcaaaggcaacaacgacctgctggtactcagtaaaccggaagtgatcgccgctatccacaacgcctactttgaagcgggcgcggatatcatcgaaaccaacaccttcaactccacgaccattgcgatggcggattaccagatggaatccctgagcgcggaaatcaactttgcggcggcgaaactggcgcgagcttgtgctgacgagtggaccgcgcgcacgccagagaaaccgcgctacgttgccggtgttctcggcccgaccaaccgcacggcgtctatttctccggacgtcaacgatccggcatttcgtaatatcacttttgacgggctggtggcggcttatcgagagtccaccaaagcgctggtggaaggtggcgcggatctgatcctgattgaaaccgttttcgacacccttaacgccaaagcggcggtatttgcggtgaaaacggagtttgaagcgctgggcgttgagctgccgattatgatctccggcaccatcaccgacgcctccgggcgcacgctctccgggcagaccaccgaagcattttacaacagtttgcgccacgccgaagctctgacctttggcctgaactgtgcgctggggcccgatgaactgcgccagtacgtgcaggagctgagtcggattgcggaatgctacgtcaccgcgcacccgaacgccgggctacccaacgcctttggtgagtacgatctcgacgccgacacgatggcaaaacagatacgtgaatgggcgcaagcgggttttctcaatatcgtcggcggctgctgtggcaccacgccacaacatattgcagcgatgagtcgtgcagtagaaggattagcgccgcgcaaactgccggaaattcccgtagcctgccgtttgtccggcctggagccgctgaacattggcgaagatagcctgtttgtgaacgtgggtgaacgcaccaacgtcaccggttccgctaagttcaagcgcctgatcaaagaagagaaatacagcgaggcgctggatgtcgcgcgtcaacaggtggaaaacggcgcgcagattatcgatatcaacatggatgaagggatgctcgatgccgaagcggcgatggtgcgttttctcaatctgattgccggtgaaccggatatcgctcgcgtgccgattatgatcgactccagtaaatgggacgtcattgaaaaaggtctgaagtgtatccagggcaaaggcattgttaactctatcagcatgaaagagggcgtcgatgcctttatccatcacgcgaaattgttgcgtcgctacggtgcggcagtggtggtaatggcctttgacgaacagggacaggccgatactcgcgcacggaaaatcgagatttgccgtcgggcgtacaaaatcctcaccgaagaggttggcttcccgccagaagatatcatcttcgacccaaacatcttcgcggtcgcaactggcattgaagagcacaacaactacgcgcaggactttatcggcgcgtgtgaagacatcaaacgcgaactgccgcacgcgctgatttccggcggcgtatctaacgtttctttcagcttccgtggcaacgatccggtgcgcgaagccattcacgcagtgttcctctactacgctattcgcaatggcatggatatggggatcgtcaacgccgggcaactggcgatttacgacgacctacccgctgaactgcgcgacgcggtggaagatgtgattcttaatcgtcgcgacgatggcaccgagcgtttactggagcttgccgagaaatatcgcggcagcaaaaccgacgacaccgccaacgcccagcaggcggagtggcgcagctgggaagtgaataaacgtctggaatacagcctggtcaaaggcattaccgagtttatcgagcaggataccgaagaagcccgccagcaggctacgcgcccgattgaagtgattgaaggcccgttgatggacggcatgaatgtggtcggcgacctgtttggcgaagggaaaatgttcctgccacaggtggtcaaaagcgcgcgcgtcatgaaacaggcggtggcctacctcgaaccgtttattgaagccagcaaagagcagggcaaaaccaacggcaagatggtgatcgccaccgtgaagggcgacgtccacgacatcggtaaaaatatcgttggtgtggtgctgcaatgtaacaactacgaaattgtcgatctcggcgttatggtgcctgcggaaaaaattctccgtaccgctaaagaagtgaatgctgatctgattggccttagcgggcttatcacgccgagcctggacgagatggttaacgtggcgaaagagatggagcgtcagggcttcactattccgttactgattggcggcgcgacgaccagtaaagcgcacacggcggtgaaaatcgagcagaactacagcggcccgacggtgtatgtgcagaatgccagccgtaccgttggtgtggtggcggcgctgctttccgatacccagcgtgatgattttgtcgctcgtacccgcaaggagtacgaaaccgtacgtattcagcacgggcgcaagaaaccgcgcacaccaccggtcacgctggaagcggcgcgcgataacgatttcgcttttgactggcaggcttacacgccgccggtggcgcaccgtctcggcgtgcaggaagtcgaagccagcatcgaaacgctgcgtaattacatcgactggacaccgttctttatgacctggagcctggccgggaagtatccgcgcattctggaagatgaagtggtgggcgttgaggcgcagcggctgtttaaagacgccaacgacatgctggataaattaagcgccgagaaaacgctgaatccgcgtggcgtggtgggcctgttcccggcaaaccgtgtgggcgatgacattgaaatctaccgtgacgaaacgcgtacccatgtgatcaacgtcagccaccatctgcgtcaacagaccgaaaaaacaggcttcgctaactactgtctcgctgacttcgttgcgccgaagctttctggtaaagcagattacatcggcgcatttgccgtgactggcgggctggaagaggacgcactggctgatgcctttgaagcgcagcacgatgattacaacaaaatcatggtgaaagcgcttgccgaccgtttagccgaagcctttgcggagtatctccatgagcgtgtgcgtaaagtctactggggctatgcgccgaacgagaacctcagcaacgaagagctgatccgcgaaaactaccagggcatccgtccggcaccgggctatccggcctgcccggaacatacggaaaaagccaccatctgggagctgctggaagtggaaaaacacactggcatgaaactcacagaatctttcgccatgtggcccggtgcaagcgttagcggttggtacttcagccacccggacagcaagtactacgctgtagcacaaattcagcgcgatcaggttgaagattatgcccgccgtaaaggtatgagcgttaccgaagttgagcgctggctggcaccgaatctggggtatgacgcggactgattcacaaatctgtcacttttccttacaacaaacagggcgctcaatgagtgccctgtctctttattaatatgaaacacttatactggaaacaggctggaataatcttagccggaaaaacgaatgtcaaaaggcacagtaaagatgccagtcagcgtgtttccggtcctttggtcattcaattgcttcaggaacatataacgataaggagaacctgaactcgtgttaacgctgcttcacctgctttctgccgtcgccctgctggtctgggggactcatattgttcgaaccggcgtaatgcgcgtcttcggcgcgcgtttgcgtactgtccttagccggagcgtcgaaaaaaagccgctcgccttttgcgcggggatcggcgttaccgcactggtacagagcagtaatgccaccaccatgctggtgaccagctttgtcgctcaggatctggtagccctcgcaccggctctggtcattgtgctgggtgcagatgtcgggacggcgctaatggcgcgtattctcaccttcgacttatcctggctgagtccgttacttatttttatcggcgtgatttttttcctcggacgcaaacagagtcgcgccgggcaactgggccgcgtcggtattggtcttgggctgattttgctagcgctggagttgattgtgcaggccgtaacgccgatcacccaggcaaacggcgttcaggtgatctttgccagcctgaccggcgatattctgctggatgcgctgattggcgcgatgttcgccattatcagctactccagccttgctgctgtactgctgaccgcgactctgaccgccgcaggcattatctccttccccgtggcgctctgtctggtgattggtgctaacctcggttccggtctgctggcaatgctcaacaacagtgccgccaatgccgcagcccgccgtgtcgcgctgggtagtctgctgtttaagctggtgggtagcctgattatcctgccgtttgtccatttgctggcagagacaatggggaagttgagtttgccaaaagcggaactggtgatctatttccacgtcttctacaaccttgtacgttgcctggtcatgctgccatttgttgacccgatggcacggttttgcaaaacgattattcgcgatgaaccggaactggatacccagctacggcctaaacatctggatgtcagcgcgctggatacgcccacgcttgctctggcgaacgccgcgcgcgaaaccctgcgcattggcgacgccatggaacagatgatggaagggttgaataaagtgatgcacggtgagccacggcaggagaaagagctgcgtaagctggcagatgatatcaacgttctctacaccgccattaagctgtatctggcgcggatgccaaaagaagagctggcggaggaagagagccgccgctgggcagagatcatcgaaatgagcctcaaccttgaacaggcctccgatatcgtcgagcgcatgggcagcgaaattgctgacaaaagtctggcagcacggcgggcatttagccttgatgggttgaaggaactggatgcgctctatgagcaattgctcagtaatttaaagctggcaatgagcgtgttcttctctggcgatgtcaccagcgctcgtcgtttgcgtcgcagcaaacatcgttttcgcattcttaatcgccgctattcccacgcccacgtcgatcgcctgcatcagcaaaacgtgcagagcattgaaaccagtagcctacatttaggcttactgggagatatgcagcgcctgaacagcctgttttgtagcgtggcttacagtgtgctggaacagccggatgaagatgaaggacgggacgagtattaatattgtgaatcctgtaggcctgataagacgcgtcaagcgtcgcatcaggcactatgaacaagatgccggatcatgcatccggcaattcacttaaaaacggtgaccagcttccagcggaaccgcttcttcaccagccttaaacacataagtggtgttcgggccacccagcgtagcgtgacctttactcactgtgatccagttaccttccggtagaccaataatcgtcagttctggcgcgacgaccagcagttcgcgaatacgctgctcacgggtttcacctttatggccttccggcagcgcgttggtgaagtgcgggttgatttgcagcgggaacagatttagcgcatcgaaaccttgcggatcgacaatcggcatatcgttggtggtacgaatagttgggcaagcaaggttagcgcctgcgctccagccaatatacagagcgccacgtttaaccacgtcagtaattggtgccagcagcccgcgctcgcggcactgtttcagcaactggaaagtattcccgccgccgacaatcacgatctcagcattttcaatcgcggcaacgggatcgacaacgctatgaataccggtgacagaaacacccagcggagcgagaaccgcagccgttttcgctgtgtaatcatcccaggtctgcgttacgccagcgaaagggataaacaccgcactgcggcgaccctgcaactgttcagcaattagcggcagtgcatgttccagccaggctttacccggcagcgtgctgttactcaataaaagcagttccattacttctccggttagtaagaaatcacgggaggcatgctaccactgcgaatttaaccacttactgacatggctcacgatgtcgcacattgcttctggaaagtgatttgagcaggtaacgaattcaagccaatggaaataacaaatagttcgctcatgactattttttatcaacccaaaggtacggtatattccgttttttacaggagaatttatgctgcccgacagtagtgtccgtttaaataaatacatcagcgaaagcggaatttgcagtcgccgcgaagcggatcgctatatcgagcaaggcaatgtgttccttaatggcaagcgagccaccattggcgatcaggtgaaacccggcgacgttgtgaaagtaaacggtcagttgattgaacctcgggaagccgaagatttggtacttatcgccctgaacaagcccgttggtattgtaagcaccaccgaagatggcgagcgcgataacattgtcgatttcgttaaccacagcaaacgcgtgttcccgattggccgcctggataaagactcccaggggctgattttcctcaccaatcacggcgatctggtgaataagatcctgcgtgctggcaatgatcatgagaaagagtatctggtgacggtcgataaaccgattaccgaggagtttattcgcggcatgagtgcgggggtgccaatcctcgggacagtgaccaaaaagtgcaaagttaaaaaagaagcgccgtttgtcttccgcattaccctggtgcaggggctgaaccgtcagatccggcgcatgtgcgagcatttcggctatgaagtgaaaaagctggaacgcacgcgcatcatgaacgttagcttaagcggcattccgctgggggaatggcgcgatttaaccgacgatgagttaatcgacctctttaagctcattgaaaattcctcttccgaggtaaaacctaaagcgaaggccaaaccgaaaacagcgggcatcaaacgtccagtcgttaagatggaaaaaacggcggaaaaaggcggtcgcccggcgtccaacggtaagcgttttaccagcccggggcgtaaaaagaaggggcgctgattaacgcctcagactgatgaaaacggcccaaaagtgcccggacagtcccctcgccccttcgggaaaagggttagggtgaggggaaaattgtgttcacactgacgagtgaaaatctcaggcgttgattgtggattagcgcctgccgcgcgtgctcgtatttgcactccagctaaaactcgcttcaggatccggtttataagcctgctttttcttcaactggcgggcttttttcgcttcagcctcacgctcaaccattaatttatcgatgtaatctttcttaatgctgttggtttcggagttggtcaatacgcgaccatgcgcaatccgcgcccgatccagcagtgttttaagttcacgctgctcgcgttcagtcatctctttttgggtaatacgggggagtgccatgatggtgccctcagtgagccagagagttcagtgtacgggaattcgtttgcgagcagaactgataatattcattttgccttctcttaactatttatctctttcgataattaattagagatgcagataaaaaaattaaaggcaattattctccgataaagacgctggttaacagagtacaggctcgtttattgatgagcatagtgacaagaaaatcaatacggcccgaaatatagcttccaggccatacagtatttactcaaacaaattactatgcagtttttgcaccacctgctcggcatcttcgccgggcaccaggaagcacaggttatggctggatgcgccataacaaatcatgcgaatgttgaacggttccagtacgccgaatacctctttgccaacgccgcaggctttactcaggtcattgccaatcaacgcgaccagcgccagaccttcttccacctccacccgacacagtgcggaaagctccatcagcagagattgcgtcagcaacgtatcgccagtggaggtactaccggtggtatcaagggttaatgccacgctcacttcactcgtggtgattaagtctacgctaatattatgccgcgcgaggatgccgaaaacttccgcgaggaaaccgcgagaatgcagcatattcaggctgtgcaaagtgagcagagtctgattgcgacgaagcgccagagcgcggaacagcggcggattttcagttttattgcacaccagcgtaccacctgcgcgtgggtctttgctggagccgacaaagaccgggatatcgctgcgtactgcgggtagcaacgttgccggatgcagtacttttgcaccaaaagttgccatctctgccgcttcggcaaacgcgatttcatcaatgcgttttgctgcggaaactacgcgtggatcggtggtgtagatgcccgggacgtcggtccagatatcaacacgagatgcgtgtaaagcctccgccagcaaggctgccgtataatcgctgcctccacggccaagcgtcgttgtacgacctttattttcgctaccgataaatccctgggtgatcactaagccttcattgagacgtgggagcagctgcagcgcggccagttccgccagcgcggctatatctggctctgcacgaccaaatcggtcgttggtacgcatcactttacgtacatcaaaccactgtgcctgaacatcgcgttcgcgcaggatctcaacaaacagcagggtgctcatcagctcgccgtggctgaccagctcatctgtcagcgccggagacgttgccagcgccgccgcttctgccagaacagtaatgttctccagcagacgttcaatctcttcacggataacgttcgggtaacgcagacgttccagaatggcaaactggatgttgcggatagcgtcgagtttttcgaatcgctcgccaggttccagtccttcagctaaagcgaccagcagattagtgataccagcagaagcgctgaggacaactaaacgcacgttggcatcagaaagcacaatatcagcgctgcggttcatggcgtcaaaatcagctacgctggtaccgccaaatttggagacaacaatttcagacataactacctcgtgtcaggggatccattttcagccttggcacaagggaagagcggaagacgggtgggcgcagagcgatacttcgctactattttcacccagaagtgctccaccacttgcgaaacgcccgactgcgaacgcttctggtgacaacccaggggattcagcccctgtagccgatgatgaacgtggccagccgttcaatcacctcggcgatgcaccccctcaggtgttatcacaggactggctcctccaacaccgttacttgggcaacgcgcctcttctggcctgcgctagcgcaggtagtacatttataaataaagggtgagcggggcggttgtcaacgatggggtcatgcggatttttcatccactcctggcggtcagtagttcagctaataaatgcttcactgcgctaagggtttacactcaacattacgctaacggcactaaaaccatcacatttttctgtgactggcgctacaatcttccaaagtcacaattctcaaaatcagaagagtattgctaatgaaaaacatcaatccaacgcagaccgctgcctggcaggcactacagaaacacttcgatgaaatgaaagacgttacgatcgccgatctttttgctaaagacggcgatcgtttttctaagttctccgcaaccttcgacgatcagatgctggtggattactccaaaaaccgcatcactgaagagacgctggcgaaattacaggatctggcgaaagagtgcgatctggcgggcgcgattaagagcatgttctctggcgagaagatcaaccgcactgaaaaccgcgccgtgctgcacgtagcgctgcgtaaccgtagcaataccccgattttggttgatggcaaagacgtaatgccggaagtcaacgcggtgctggagaagatgaaaaccttcagtgaagcgattatttccggtgagtggaaaggttataccggcaaagcaatcactgacgtagtgaacatcgggatcggcggttctgacctcggcccatacatggtgaccgaagctctgcgtccgtacaaaaaccacctgaacatgcactttgtttctaacgtcgatgggactcacatcgcggaagtgctgaaaaaagtaaacccggaaaccacgctgttcttggtagcatctaaaaccttcaccactcaggaaactatgaccaacgcccatagcgcgcgtgactggttcctgaaagcggcaggtgatgaaaaacacgttgcaaaacactttgcggcgctttccaccaatgccaaagccgttggcgagtttggtattgatactgccaacatgttcgagttctgggactgggttggcggccgttactctttgtggagtgcgattggcctgagcattgttctctccatcggctttgataacttcgttgaactgctttccggcgcacacgcgatggacaagcatttctccaccacgcctgccgagaaaaacctgcctgtactgctggcgctgattggcatctggtacaacaatttctttggtgcggaaactgaagcgattctgccgtatgaccagtatatgcaccgtttcgcggcgtacttccagcagggcaatatggagtccaacggtaagtatgttgaccgtaacggtaacgttgtggattaccagactggcccgattatctggggtgaaccaggcactaacggtcagcacgcgttctaccagctgatccaccagggaaccaaaatggtaccgtgcgatttcatcgctccggctatcacccataacccgctctctgatcatcaccagaaactgctgtctaacttcttcgcccagaccgaagcgctggcgtttggtaaatcccgcgaagtggttgagcaggaatatcgtgatcagggtaaagatccggcaacgcttgactacgtggtgccgttcaaagtattcgaaggtaaccgcccgaccaactccatcctgctgcgtgaaatcactccgttcagcctgggtgcgttgattgcgctgtatgagcacaaaatctttactcagggcgtgatcctgaacatcttcaccttcgaccagtggggcgtggaactgggtaaacagctggcgaaccgtattctgccagagctgaaagatgataaagaaatcagcagccacgatagcagcaccaatggtctgattaaccgctataaagcgtggcgcggttaatcatcgtcgatatgtaggccggataaggcgttcacgccgcatccggcaaccgatgcctgatgcgacgcggtcgcgtcttatcaggcctacaggtcgatgccgatatgtacatcgtattcggcaattaatacatagcacgattgattaaataaccttaataacaatgccgacgttatgtcggcatttttttatcagataaatccccttgtctgtaatttaacggaaatcataccgtgaggttaatcctaaaatagatttttaatcgttgtttatttcggaaaatacgcagattaattgcttttgtttttattttaagtttatgatttttattgttatttaaatataagttgaaacttatatttgatattcattccaattatcctaaaacgccatcgctaattccccgcgccgtaattcgcatgctttagttgtgtatactcgatcccgcccgaaatgtttttgggtaaatctccattcattcaatgaagggaaattgttatgaaaaaagttctgtatggcatttttgccatatctgcgcttgcggcgacttctgcgtgggctgcacctgtacaggtgggcgaagcggcagggagcgcagcaacgagcgttagcgcggggagttcctccgcgaccagcgtcagcaccgtaagcagcgcggtgggtgtcgcgcttgcggcaaccggtggcggtgatggttctaataccgggaccaccacaaccacgaccaccagtacccagtaataaagtatgtatccccaaaataattcgagtcattgcatctgtggctagaagtatgaagggattaaccataaccacactccggtgtggttattctgcccctctggagaagagtcgtgaagcgacctgcactcattcttatctgcctgttattacaggcctgtagtgccacgactaaagagctgggcaatagtctgtgggacagtctgttcggcacgccaggcgtacagctgacggatgatgatattcaaaatatgccctacgccagccagtacatgcagcttaatggcgggccgcagttatttgtggtgctggccttcgctgaagacggacaacaaaaatgggtcactcaggatcaggctactctcgttacccaacatggccgtctggtgaagactctgctcggcggcgacaacctgattgaagtgaataaccttgctgccgacccgctgattaaacccgcacaaatcgttgatggcgcaagctggacgcgcacgatgggctggaccgagtaccagcaggtacgctacgccaccgcacgcagtgtcttcaaatgggatggcaccgataccgtcaaagtcggcagcgatgaaaccccggttcgcgtgctggacgaagaagtctccaccgaccaggcgcgctggcataaccgctattggatcgacagcgaagggcaaattcgccagagcgaacagtatctcggcgcggattattttccggtgaaaaccactctcatcaaggcggcaaaacaatgattaaacaaactattgtcgcgttgcttttgagtgtgggagcgagtagcgtcttcgcggcaggaaccgtcaaggtgttcagcaatggcagcagtgaggccaaaacgctaacgggcgcagagcatttaatcgatctggtaggccaaccgcggctggcaaacagctggtggcccggtgcggtgattagcgaagagctggcaacggcggcagcattgcgtcagcagcaggcgttgctgacacggctggcagaacagggcgcagattccagcgccgacgatgccgctgcgattaacgccttacgccagcaaattcaggcgttgaaagtgacgggcaggcaaaaaatcaatcttgatcccgatatcgtccgcgttgccgaacgcggtaacccgccgttgcagggcaactacacgctgtgggtcggaccaccgccgtccacggtcacgttgttcgggcttatcagccgtcctggcaagcagccattcactccaggtcgcgacgtggcgagctatctctctgaccagagcctgctcagcggtgcggatcgcagctacgcgtgggtggtttacccggacggacgcacgcaaaaagcgccggtggcttactggaacaagcgtcacgtagagccgatgcccggcagcattatttatgttggcctcgcggactccgtctggagtgagacgcctgatgcccttaacgccgacattcttcagactctgacgcagcggatacctcaataatgaaaaaaagacatctgcttagcttactggcgctgggcattagcacagcttgctacggcgaaacatatcctgcgcccattggtccgagccagagcgatttcggtggcgtaggattattacaaacgcccaccgcgcgtatggcacgggaaggggagttgagtctgaactatcgcgataacgatcagtaccgttattacagtgctagtgtgcaactcttcccgtggctggaaacaacgctgcgctacaccgacgtgcgcacccggcagtacagcagcgtcgaagcgttctctggcgatcaaacgtataaagataaagccttcgatctcaaactgcgtttgtgggaagagagttactggctgccgcaagtggcggttggtgcgcgggatatcggcggtacggggctgtttgatgcggaatatcttgttgccagcaaagcctgggggccgttcgattttacgctcggcctgggctgggggtatttgggcaccagcggtaatgtgaaaaatccgctctgtagtgccagtgataaatattgctatcgcgataacagctacaaacaggcgggatctatcgacggtagccagatgttccacggtcctgccagtctgtttggcggcgtggaataccagacgccctggcaaccgctgcgcctgaaactggagtatgaaggcaataattatcagcaggattttgccgggaagctggagcaaaaaagtaagtttaacgtcggtgcgatttatcgcgttaccgattgggccgacgttaaccttagctatgaacgtggcaacacctttatgtttggcgttacgttgcgcaccaactttaacgatctgcgcccgtcttacaacgataacgcccgcccgcaatatcaaccgcagccgcaggatgccattttgcagcatagcgtggtggcgaatcagttaacgctgttgaaatacaatgccggacttgccgatccacagatccaggcgaaaggcgatacgctgtatgttaccggcgagcaggtgaaatatcgtgatagccgcgaagggatcatccgtgcgaatcggatcgtgatgaacgatctgccggatgggatcaaaacgatccgcattacggaaaatcgccttaacatgccgcaggtgacgacggaaaccgatgtcgccagcctgaaaaatcatctcgccggagagccgttgggccacgaaacgacgctggcgcaaaaacgcgtcgagccagtggttccgcagtccaccgagcagggctggtatatcgacaaaagtcgctttgatttccatatcgatccggtgctgaaccagagcgtcggtggcccggaaaacttttacatgtatcagctgggcgtgatgggaacggcagatttgtggctgacggaccatctgctgaccaccggcagcctgtttgcaaatcttgccaacaactacgacaagtttaactacactaatcctccgcaggacagccacttaccgcgcgtgcgtacccatgtgcgcgagtatgtgcagaacgatgtctatgtgaataacctgcaagccaactacttccagcatctgggcaacggcttctacggtcaggtctacggtggttatctcgaaaccatgtttggcggtgcgggggcagaagtgttgtatcgcccgctggacagcaactgggcgtttggtctggatgccaactacgttaaacagcgcgactggcgtagtgcaaaagatatgatgaaattcaccgactacagcgtgaaaaccggacatctgaccgcctactggacgccatctttcgctcaggatgtgttagttaaagccagcgtcgggcagtatctggcaggggataaaggcggcacgctggagatcgccaaacgctttgatagcggcgtggtggtgggtggctatgccacgatcactaatgttagcaaagaggagtacggcgaaggggacttcaccaaaggcgtgtatgtcagcgtaccgttggatctcttcagctctggcccgacacgcagccgtgcggcgattggctggacgccgctgacgcgtgacggtggtcagcaacttgggcgtaagttccagttgtatgacatgaccagcgaccgtagcgtcaatttccgctaagtcatgggaaaggtgccagttttcgcactcactggcaccttcattcttaatggcctgtcgagccatcaggaacgcagttcactcccggtttgcgatctggtgtgtaaaggcgaaaacattctgtcttcctgtccgtcgatatcggttgcaggtctggttgcctgagcgactgggccatcattgggctggagacattgctttgcggtaggtcggctttatcagcagtaccgagcggaccagcataagcaggaagaacagagactgataacatcaaagcagcaaaataaggcttcatttttaccacctttatcaggttacgtttcatttgttccagaggaacattgtcgatttttcgcgcattgctggtggctgggaatcacctgaatgggtgatttttgaattaccggctttggtgcggtttgtcttgccggatgcgccgccaggcgcggcttatccggcctacgggtaggtatatccggctttggtggaggcgcgctccaaatccaggttgaacaaaacatacacaaaaaatatagatctccgtcacatttttgcgttatacaggaagctcgccactgtgaaggaggtactgctatgacgagtctctctcgtccgcgcgtggagtttatctccaccattttgcagaccgtactcaatcttggcctgctgtgcctcggcctgattttggttgtcttcctcggcaaagaaacggtgcatctggctgatgtgctgttcgcgccagaacaaaccagcaaatatgagctggtagaaggactggtggtttactttctctatttcgaatttatcgcgctgattgtgaagtactttcagtccggttttcacttcccgctacgttactttgtctatattgggatcaccgccattgtgcgcttgatcatcgtcgatcataaaagcccactggatgtgttgatctacagcgctgcgatcctgttactggtgatcaccctgtggctgtgtaatagcaaacggctgaagcgggagtaaaaagtcagcacgccgaaatggcgcggcgtgctggacaggaagattacagcgtagcagtttgttgtgttttcttcgtttccggttcccagagcgcttccagctcctcaagggttttacctttggtttccgggacaaatttccacataaacagtgctgccagaacgcccatacaaccgtaaatccagtaggagaaaccgttgtggaaatgggccaccagccaggagtttttgtccatcatcgggaaggtccaggagacgaagtagttcgccagccactgggccgccaccgcgattgccagcgctttaccacgaatagcattcgggaagatttcgctcagcagtacccagcataccggaccccaggacatggcaaaggcggcaacatagaacagcatgctcagtagcgccacaatacccggtgcctgagtgtaaaacgcggtaccgaggctaaacataccgattgccattccgagtgcgccgataatttgcagtggcttacgaccaaatttatccaccgtcataattgccagaacggtgaaggtgaggttgataactccgacaataatggtctgcaacagcgcgatatccgtgctggcccccagcgttttgaacacttccggcgcgtagtacagcaccacattgatgccgacaaattgctggaagatggagagcattacgccgattacaatcacgcccacgccaaacatcagcagacgaccaccggttttgcggccatgatccagggagtgtttaatttcctgtactgcctgagttgcaagcgtgttgcccataattttgcgcaggataccttccgcctgttcttgcttgccgcggctcatcagccagcgaggactttctggcacggtatacagcagcattaagaacagcagtgcagggatacattcgctggcaaacatataacgccagccgtcagtattcagccagctggcatcaccggaacgggcaataaaatagtttacgcagtaaactaaaagttgcccgaaaataatcgcaaactggttaaaagagaccagtttcccgcgaatatgagctggagccagttccgcaatatacattgggctgagcatactggctaaaccaacgccaataccgccaataatgcgataaataacaaattccgggacataacctgccagataaacaggcacagtgttgtccgggtttatagaggtaaaaccaagttctggccaggcagaacctacaccagaaataaaaaacaggacagcagcaatcttaagactatcacgacgaccgaagcggttactgcaataaccaccgagggcaccgccgatgatgcaaccaatcagagcgctggccacgcaaaaccctaacagggagttggcagcggattcacttaagttttgtggagcaacaaagacggtattgagactctcaacagtaccggaaataacggcggtgtcgtagccaaataataaaccacctaatgtagcgactaaggtaatgctaaatatataactggaattatactgggtattcattcagacctgccttagaccattctgatcttttatcagtgcattgatgttggaattgtcaggcagttaaggcaattatcattttttacaatgcgtttacgtaatgtcttttctgtgatcttaattgtgataattatccaaaattgataaaaacaatactattgccgtgactcagagcacgaaagagaattatcgtaagtgggaaaacaaataacgtaaaaataataagctctatgatggaaatattaaccggcgaacgattcagattgcagacgaaagaaaaaaaggcgctccgtggagcgccgaataacagtcacaagttgggataacgtaagttgagggtgcagcggcataacattggcagaacaacatctttaacctttcacaccacctgccgtcaggccgttgaccagccagcgttgagccagcaagaagacgatggtgatcggtaatgcagacatcacggcagcggcggcaaagtcaccccacaggtagttttgcgggttgaggtattgctgcatccccacggccagggtgtagctgtttacgtcacgcagtaacaggctcgcgaccggaacttcagtaatggcagcgataaagctcaggatgaataccaccgccagaatcggtacactcagcggcaacaggacaaggcggaaggcctgccacggtgtcgcaccatccagcgcagcagcttcttccaggctactgtcgatggtttcgaaatagcctttgatggtccagacatgcagcgcaatcccacccagatacgcgaaaattacgccgccgtgagtattcaggccaatgaatggaatgtactcacccagacgatcaaacaacgcatacaacgcgaccagactaagtactgccgggaacatctggaaaatcagcattcctttcagcagcgtcgctttgcctggaaagcgcatacgggcgaaagcgtaggcgcaggtggtggagagcgccacaatgccaatcgcggaaatcccggcgacctttacgctgttccacagccacagcagtaccgggaatggcggtggcgtaatgcgaccatcagcctgttcaacgctaaaacctaacgccagtttccagtgatcccaggagatttgctccgggatcaggctgccggtcgcaaagtttccctgacgcaggctgatagcgacgaccatcagcagcgggaacataatcgctgcgataaaaagtagcagtagcaggtgagtaataaataaacgagctttttggcttttcggttggaccattgccatttttgttatctcccttaatcaaacttcattcgcgtggctttcaggttcactatcgccagcgcacccaccagcaggaagatcagcgtggcaattgctgccgccagaccgaagtcctgacccccgccgccttcaaaagcgatgcggtaggtgtagttaacaagcaggtcggtataaccggctggcgtggtcgtgccaagacgatccgggccgccgttggttaacagttgaatcagcacgaagttgttaaagttaaaggcgaagctggcgatcatcagcggcgtcagcggtttaatcagcagcggcagcgtaatcttaaagaagttctggaacggacctgcgccatccattgcactggcttcatacaaatcgtccggaatcgctttcagcaagcccatgcagaggatcatcatgtacggataacccagccaggtattgacgataattagcatcgtgcgggcggtggtcggatcgctgaaccaggcgggcttcacgccaaacagcgcgctcaacatcatgttgatttcaccgaagctctggttaaacaaccctttgaaaatcaagatactaatgaagcttggcaccgcgtagggcagaatcagcaggacgcgatagaccgctttgccgcgcaacgcttcccactgcaccagacacgccagaaccatgccgaccgccaccgttaaaaagacagtgatcaggctgaacaccacggtccagacgaaaatggcgaggaacggtttctgaatgccttcgtcggtaaagacgcgggtaaagtttttccagccggtggtcacggtgtaaccggggcttagcttttcatcaccccagttgccgtcggcggtaatggactggtaaaagccaatttggttattcggacgatatttcacgccgctctgattattcgtcaacgtgccgtcaccgtcgagtgtgtagagcggctgcgtgccagaaaactggcgcagggagctcatcatcactttgttgccatccggcagaatggcggtaatgtcactcagcgcctgacgattctgggtaatcacgcgcagattcgcgcgttcgccttcgggctgggcggtcgtttctttcagttgcagtttttgctcgccgccaaatttaaaagcgtcggagaggtaatttttgccggtttcgccgtcgctgagcgccagttgccactcatcgcccgccgggtaaagaccaaagttataggttttgcctgcttgccaggagcgatctaacaacacttcctgcgcacgttcaaaagtcagctggttagtgctgctgtagttggtgaaggcaatggcgatggtgcagaccagagggaagaggacgaataatcccattccagccattcccgggtaaacatagcgccaggcgtaggctttacgattggcgaaaatatacagccccgcactactcaatatcagcgtggtaatggcgaacaggtattccccttgtgcgtacattaaaacaacaaggtaacccaccagcaggccgagcagacctagcacactccatttcagcgcgtcgctttgccaccaatgtttctttttaatgacatccatggggttcttcctcattccaggacggataaggctttcacgccttatccgacaacaactgcctgatgcgacgctgacgcgtcttatcaggcctacatacgtttcggttttgtaggccggacaaggcgttcacgccgcatccggcatttcacagcattacttggtgatacgagtctgcgcgtctttcagggcttcatcgacagtctgacgaccgctggcggcgttgatcaccgcagtacgcacggcataccagaaagcggacatctgcgggatgttcggcatgatttcacctttctgggcgttttccatggtggcggcaatacgtggatctttcgccaactcttcctcgtaagacttcagcgctacggcacccagcggtttgtctttattaaccgcttccagaccttcatcagtcagcagatagttttcgaggaactctttcgccagctctttgttcggactggcggcgttaatacctgcgctcagcacgccaacgaacggtttggatggttgacccttgaaggtcggcagtaccgttacaccataattcactttgctggtgtcgatgttggaccatgcccacgggccgttgatggtcatcgctgtttcgcctttattaaaggcagcttctgcgatggagtaatcggtgtctgcattcatgtgtttgtttttaatcaggtcaaccaggaaggtcagacccgctttcgcgccagcgttatccacgcccacgtctttaatgtcgtacttgccgttttcatacttgaacgcataacccccgtcagcagcaatcagcggccaggtgaagtacggttcttgcaggttgaacatcagcgcgctcttacctttcgctttcagttctttatccagcgccgggatctcttcccaggtttttggcgggttcggcagcagatctttgttataaatcaggcttaacgcttcaacagcgatcgggtaagcaatcagcttgccgttgtaacgtacggcatcccaggtaaacggatacagcttgtcctggaacgctttgtccggggtgatttcagccaacaggccagattgagcgtagccaccaaagcggtcgtgtgcccagaagataatgtcagggccatcgccagttgccgcaacctgtgggaatttctcttccagtttatccggatgctcaacggtgactttaattccggtatctttctcgaatttcttaccgacttcagcgagaccgttatagcctttatcgccgttaatccagattaccagtttaccttcttcgattttggcgagagcgctggcggaaaacatcatcgtcgttaatgcggataatgcgaggatgcgtgcacctgtttttattttcataatctatggtccttgttggtgaagtgctcgtgaaaacacctaaacggactctagtttctttatacggcaacctctttccatcctccttgcccctacgccccaccgtcgctttgtgtgatctctgttacagaattggcggtaatgtggagatgcgcacataaaatcgccacgatttttgcaagcaacatcacgaaattccttacatgacctcggtttagttcacagaagccgtgttctcatcctcccgcctcctcccccataaaaaagccagggggtggaggatttaagccatctcctgatgacgcatagtcagcccatcatgaatgttgctgtcgatgacaggttgttacaaagggagaagggcatggcgagcgtacagctgcaaaatgtaacgaaagcctggggcgaggtcgtggtaagcaaagatatcaatctcgatatccatgaaggtgaattcgtggtgtttgtcggaccgtctggctgcggtaaaagcactttactgcgcatgattgccgggcttgagacgatcaccagcggcgacctgttcatcggtgagaaacggatgaatgacactccgccagcagaacgcggcgttggtatggtgtttcagtcttacgcgctctatccccacctgagtgtagcagaaaacatgagttttggcctgaaactggctggcgcaaaaaaagaggtgattaaccaacgcgttaaccaggtggcggaagtgctacaactggcgcatttgctggatcgcaaaccgaaagcgctctccggtggtcagcgtcagcgtgtggcgattggccgtacgctggtggccgagccaagcgtatttttgctcgatgaaccgctctccaacctcgatgctgcactgcgtgtgcaaatgcgtatcgaaatctcccgtctgcataaacgcctgggccgcacaatgatttacgtcacccacgatcaggtcgaagcgatgacgctggccgacaaaatcgtggtgctggacgccggtcgcgtggcgcaggttgggaaaccgctggagctgtaccactatccggcagaccgttttgtcgccggatttatcggtagcccaaagatgaacttcctgccggtaaaagtgaccgccaccgcaatcgatcaagtgcaggtggagctgccgatgccaaatcgtcagcaagtctggctgccagttgaaagccgtgatgtccaggttggagccaatatgagcctgggtattcgcccggaacatctactgccgagtgatatcgctgacgtcatccttgagggtgaagttcaggtcgtcgagcaactcggcaacgaaactcaaatccatatccagatcccttccattcgtcaaaacctggtgtaccgccagaacgacgtggtgttggtagaagaaggtgccacattcgctatcggcctgccgccagagcgttgccatctgttccgtgaggatggcactgcatgtcgtcgactgcataaggagccgggcgtttaagcaccccacaaaacacacaaagcctgtcacaggtgatgtgaaaaaagaaaagcaatgactcaggagatagaatgatgattactctgcgcaaacttcctctggcggttgccgtcgcagcgggcgtaatgtctgctcaggcaatggctgttgatttccacggctatgcacgttccggtattggttggacaggtagcggcggtgaacaacagtgtttccagactaccggtgctcaaagtaaataccgtcttggcaacgaatgtgaaacttatgctgaattaaaattgggtcaggaagtgtggaaagagggcgataagagcttctatttcgacactaacgtggcctattccgtcgcacaacagaatgactgggaagctaccgatccggccttccgtgaagcaaacgtgcagggtaaaaacctgatcgaatggctgccaggctccaccatctgggcaggtaagcgcttctaccaacgtcatgacgttcatatgatcgacttctactactgggatatttctggtcctggtgccggtctggaaaacatcgatgttggcttcggtaaactctctctggcagcaacccgctcctctgaagctggtggttcttcctctttcgccagcaacaatatttatgactataccaacgaaaccgcgaacgacgttttcgatgtgcgtttagcgcagatggaaatcaacccgggcggcacattagaactgggtgtcgactacggtcgtgccaacttgcgtgataactatcgtctggttgatggcgcaagcaaagacggctggttattcactgctgaacatactcagagtgtcctgaagggctttaacaagtttgttgttcagtacgctactgacagcatgaccagccagggtaaagggctgagccagggttctggcgttgcatttgataacgaaaaatttgcctacaatatcaacaacaacggtcacatgctgcgtatcctcgaccacggtgcgatctccatgggcgacaactgggacatgatgtacgtgggtatgtaccaggatatcaactgggataacgacaacggcaccaagtggtggaccgtcggtattcgcccgatgtacaagtggacgccaatcatgagcaccgtgatggaaatcggctacgacaacgtcgaatcccagcgcaccggcgacaagaacaatcagtacaaaattaccctcgcacaacaatggcaggctggcgacagcatctggagtcgcccggctattcgtgtcttcgcaacctacgccaagtgggatgagaaatggggttacgactacaccggtaacgctgataacaacgcgaacttcggcaaagccgttcctgctgatttcaacggcggcagcttcggtcgtggcgacagcgacgagtggaccttcggtgcccagatggaaatctggtggtaatagcaaaacctgggccggataaggcgtttacgccgcattcggcaaccaacgcctgatgcgacgcttgcgcgtcttatcaggcctacaacggctgtcaaatgtaggccggataaggcgtttacgccgcatccggcataaaaacaggttgtcattatctgaaaggggcgaaagcccctctgattatcgggtttagcgcgctattgcctggctaccgctgagctccagattttgaggtgaaaacaatgaaaatgaataaaagtctcatcgtcctctgtttaagtgcagggttactggcaagcgcgcctggaattagccttgccgatgttaactacgtaccgcaaaacaccagcgacgcgccagccattccatctgctgcgctgcaacaactcacctggacaccggtcgatcaatctaaaacccagaccacccaactggcgaccggcggccaacaactgaacgttcccggcatcagtggtccggttgctgcgtacagcgtcccggcaaacattggcgaactgaccctgacgctgaccagcgaagtgaacaaacaaaccagcgtttttgcgccgaacgtgctgattcttgatcagaacatgaccccaagtgccttcttccccagcagttatttcacctaccaggaaccaggcgtgatgagtgcagatcggctggaaggcgttatgcgcctgacaccggcgttggggcagcaaaaactttatgttctggtctttaccacggaaaaagatctccagcagacgacccaactgctcgacccggctaaagcctatgccaagggcgtcggtaacagcatcccggatatccccgatccggttgctcgtcataccaccgatggcttactgaaactgaaagtgaaaacgaactccagctccagcgtgttggtaggacctttatttggttcttccgctccagctccggttacggtaggtaacacggcggcaccagctgtggctgcacccgctccggcaccggtgaagaaaagcgagccgatgctcaacgacacggaaagttattttaataccgcgatcaaaaacgctgtcgcgaaaggtgatgttgataaggcgttaaaactgcttgatgaagctgaacgcctgggaagcacatctgcccgttccacctttatcagcagtgtaaaaggcaaggggtaattacgccccacagtgctgattttgcaacaactggtgcgtctcctggcgcacctttttttatgcttccttcctgggatatgagcgattttttatagtaactcacttcttcttcactaagaatatccattatctcaatgccttatcagagattcttttcctttcgccggtagtgtctggacattcaggctacttttccaggttattttatttctgttatgcagaggttttatgataagtcatatcctaaattctggcggcaataactctttgatgaaacatgatgtggtgcaaggaaataatatagtagatcttgatttactacgtaatttaaatggggtgccaggtttaaacagagataactttatttatatcagcaatattttttcaaatataaaacaacggaacgaaaaaatcatgcaataaatatgtttcgtgaagtctcaatcagtaatgatactataagtgtaaaattctacagaaatgaaaaaaattgaatgcgcttgcaattttctgatggataaagatgcgcaggggtatatcgacctgtctgatttggatttaacaagttgtcattttaaaggtgacgttataagcaaggtgtcttttttaagtagtaatctacaacatgtaacattcgaatgtaaagaaattggggattgcaattttactactgcaatagttgataatgtcatatttagatgtcgacgtttacacaatgtgatttttatcaaagcgagtggtgaatgtgtcgatttcagcaaaaatattcttgatacagttgacttcagccagagtcaacttggtcatagtaattttcgcgaatgtcagattagaaatagtaacttcgataattgttatctttacgctagccacttcaccagagcagagtttctgtctgccaaagaaataagttttattaaaagcaatttgacagctgttatgtttgattatgtgcgaatgagcacagggaattttaaagattgcattacagaacaattggaattaactattgattatagtgatatattttggaatgaagatctcgatggttatatcaataacattataaaaatgattgatacattgccagataatgcaatgatattgaaatccgttctggccgtaaaactggtgatgcaattaaaaatacttaatattgttaataaaaactttattgagaatatgaagaaaatatttagccattgtccttatataaaagatcccattatacgcagttatatccattctgatgaagataacaagttcgatgattttatgcgtcaacatcgattcagtgaggtgaatttcgatacccaacagatgatcgattttattaacagatttaatacgaataaatggctaattgataaaaataacaatttttttatccaacttatcgatcaggccttacgaagtacggatgatatgatcaaagcaaatgtttggcatctttataaagagtggattcgtagtgatgatgttagtcctatatttatagaaactgaagataatttaagaacctttaacacgaatgaattaacacgaaacgataatatctttatcctgttctccagtgtcgatgatgggccagttatggtggtaagctcccagcgcttacatgatatgttgaatcctacaaaagataccaattggaattccacgtatatctacaaatccagacatgagatgttgcctgttaatcttactcaggaaacacttttcagctccaaatctcatggtaaatatgcgcttttccccatttttactgcgagttggcgagctcatcgtataatgaataagggtgtttaagtaaaggaaaacatcaccgttcctggcatcctggacggtgatgcccctacggttgccctcgccagcacgggcatcggtaaagcgtaaggttcaacatcgttttaccacttcatgcgattgttgcgtttttgttgcgtattagatcacttaatttgctttacatctcccgtaaacacttttctgcgatacaatgcctttacgttatgtaacggagagttcggcatgagtcaccccgcgttaacgcaactgcgtgcgctgcgctattgtaaagagatccctgccctggatccgcaactgctcgactggctgttgctggaggattccatgacaaaacgttttgaacagcagggaaaaacggtaagcgtgacgatgatccgcgaagggtttgtcgagcagaatgaaatccccgaagaactgccgctgctgccgaaagagtctcgttactggttacgtgaaattttgttatgtgccgatggtgaaccgtggcttgccggtcgtaccgtcgttcctgtgagtacgttaagcgggccggagctggcgttacaaaaattgggtaaaacgccgttaggacgctatctgttcacaagtagcacattaacccgggactttattgagataggccgtgatgccgggctgtgggggcgacgttcccgcctgcgattaagcggtaaaccgctgttgctaacagaactgtttttaccggcgagtccgttgtactaagaggaaaaaaatatggagtggagtctgacgcagaataagctgctggcgtttcatcgcttaatgcgtacggataagccaattggcgcgttactgctgctctggccaacattatgggcgttgtgggtggcgacaccgggcgttccccagctctggatcctggcggtgtttgtcgcgggtgtctggctgatgcgcgctgccggatgtgtggtgaatgattatgctgaccgcaagtttgatggtcatgttaagcgcacggcgaaccgaccacttcccagcggcgcggtaacagagaaagaggcgcgcgcgctgtttgtcgtgctggtactgattagctttttactggtgctgacgctgaatacgatgaccattctgttgagcattgccgcgctagcgctggcgtgggtgtacccgtttatgaagcggtatacccatctaccgcaagtggtgctgggcgcggcgtttggctggagcattccaatggcttttgccgctgtgagtgagagcgtgccattgagttgctggttaatgttcctcgccaatattctctgggcggtggcttacgacacgcagtatgcgatggttgaccgcgatgatgatgtgaagattggcattaaatccacggcaatcctgttcggccaatacgataaattgattattggtattttgcagattggcgtactggcactgatggcgatcatcggtgagttaaatggcttaggctggggatattactggagtattctggtggctggcgcgctgtttgtttatcaacaaaaactgattgccaaccgcgagcgtgaagcctgctttaaagcatttatgaataataactatgttggtctggtactatttttagggctggcaatgagttactggcatttctgatgatgtaaaaaagccggatgatcatccggctttcttctgggttgcctgatgcgcggcgcttctcaggcctacacaacacatcgcaatttattgaatttgcagattatggaaggccggataaggcgttttcgccgcatccggcaattctctctgattacccttcgccctgcgtcgcactctcaatcgtcaaacgcacgtcacttgtaatcaactccgccagcaactgataaaccttcatcgtttctgccggttcggcatcgccgctatcgctgatatacccttcatcacgcagtgtcagcaccagagaactgaacaccgccttgtcgaagaactccggcgcgttgatgccgtgcagcacggagagacgttgcgcgacggtgcggctctctttctccagcgtaccgcggttgatgctcgggttggcactcaacaaccagaaggtgatggcataacgttgcagcgtttcgcgcgcgcctgcggccagcagctgtagcgtgcgagaatgcgccgggttgatatgcaactcatcatcttgcagggtaatcagcccctgacgttgcatctcatttgccagcgcatcaataacgtccggcaactcgtcgcgatcccagcgcaggaacagctccgctttcagcattgggtaaagcacattgacgtgctccatcaatacgtcgcgggagatgtggcgatgctgggtgacgattgccgccatcaggctaggcagcaccaacatatgcgcaatgttgttgcgatagtaggtcatcagcaccgcttgctcgcgcggcagaatgatgatgtcgccgattgtgtctttctcgacttcaaacttgttcatttgcagcgcgtgatcgataagctcgctggcgctggcactaggaacggtagagtccgtggagtagggcacgttgcgcatcagatccaggtagcagttgagttgctcggttaactgctcgcgggtgagactgcgctgacgacttgccagtagcgcagtacagcacaggttcatggcgtttgccgcgcctgcgttgttaatgcgtaccatcagatcggcagcaatattattgaccgtcggcgttaaccatgccggacgcaccgcttcgatgggatcgatagattcacgccagtcaggtacatgctggttaaggtaggtcatcaacggcattggttcaccgaagttgacgtaaccctgaccgagattacgcagcttgcttaaaccgcgcagcatctgcggcaggctctctttctctttcgtcgcgccgcgcagttctttggcgtaagtacccacttccatgacgtgctcataaccgatatagatcggaatcagcgtaatcggacgcgtgccgccacgcagcatcgcctgaatggtcatgctcagcgtaccagttttcggatccagcaaacgccccgtacgggaacgaccgccttccacgaagtactcgacggaataaccacggctgaacagttcgccgagatactcccggaaaacggtggaataaagtttattgcctttaaacgtacggcgaataaagaacgcccccagacggcggaaaatcggcccggcaggccagaaattcaggttgatcccggcggcgatatgcggcggcaccagcccctggtgatacagcacgtaagaaagcagcaggtagtccatgtgactgcggtggcaaggcacatataccagctcatgaccgtcgtgggccagctggcgaacgcgctcagcgttatggacgttgatgccctggtaaagtcggttccaggtgaagcccagaatacggtcagtcaggcgaatcatctcgtaagagaaattcgccgcaatctcttccatcagtgcaatcgcgttctgctgcgctttttcatgggagatttttttgctgcgcgcttcatcttctaccgctttggcaatggcgcgggaggcgagcagcttattaaacagatcctgacgagcaggcaaacgtgggcctacggcagccagacgttgacgggcaaagtgcatacgcgccacgcgcgccagtttctgagcgatagttttatccgtgccgtgttcatccgccatacggcgcaggctaacactcgggctgaaacgcacaaaactgtcgcgaccgagccacagtacagcgaaaaatttctgtacgccgttaagcatacgcagcggcgggttcacttcgcctttttcacgccccggcgcgcgaccaaacatcacgctcactggcaccatctgcacatccagatttgggttgctacggtgcaaatcgagatagtcgtggaacagcttaatagactcttctttcggcgtgtaataggtgaacacacgcggcccgccgtgaatgaacacatagcgcggcagtagcgtgccgtcgatttccagcggctctaacgggtcaggcaagtcatgtgccagacactgggcgcgcaacgtcagcaaatctgctttgctgttgtacggtaaaacgtacataattggacgagaggtatccagccccagttccggggcaggatctgccggaatagacttgctttttaccaggatgcttaatggtaaattcagtaatttgtagtaaattcgtggccagccggacataaacgatgtaaagcctctggttaataatgcaaatgcgcggcaaggatagcagaaagtcatgggaaattctgtggtatccgctcatgtttcgcgcggcgctacgcaaacccgaatcatcggatttaacggtacactgatattgacgctcataatgtaaaaaggttctttcaatggccaataataccactggattcacccgaattatcaaagctgctggctattcctggaaaggtttacgcgctgcatggatcaacgaagcggcattccgtcaggaaggcgtagcggtattgttggcggtggtcatcgcctgctggctggatgtggacgcgattacccgcgtgctgcttatcagctccgtgatgctggtgatgattgtggaaatcctcaatagcgccatcgaagcagtggttgaccgaattggctctgaataccatgagctttccggacgcgcaaaagatatgggatccgctgcggtgctgattgccattatcgtcgccgtgattacctggtgcattctgttatggagccattttggataacccttccagaattcgataaatctctggtttattgtgcagtttatggttccaaaatcgccttttgctgtatatactcacagcataactgtatatacacccagggggcggaatgaaagcgttaacggccaggcaacaagaggtgtttgatctcatccgtgatcacatcagccagacaggtatgccgccgacgcgtgcggaaatcgcgcagcgtttggggttccgttccccaaacgcggctgaagaacatctgaaggcgctggcacgcaaaggcgttattgaaattgtttccggcgcaagtcgcgggattcgtctgttgcaggaagaggaagaagggttgccgctggtaggtcgtgtggctgccggtgaaccacttctggcgcaacagcatattgaaggtcattatcaggtcgatccttccttattcaagccgaatgctgatttcctgctgcgcgtcagcgggatgagcatgaaagatatcggcattatggatggtgacttgctggcagtgcataaaactcaggatgtacgtaacggtcaggtcgttgtcgcacgtattgatgacgaagttaccgttaagcgcctgaaaaaacagggcaataaagtcgaactgttgccagaaaatagcgagtttaaaccaattgtcgttgaccttcgtcagcagagcttcaccattgaagggctggcggttggggttattcgcaacggcgactggctgtaacatatctctgagaccgcgatgccgcctggcgtcgcggtttgttttagttctctcttcatcaggcttgtctgcatggcattcctcactagttctgataaagcactctggcatctcgccttacccatgattttctccaatatcaccgttccgttgctgggactggtcgatacggcggtaattggtcatcttgatagcccggtttatttgggcggcgtggcggttggtgcaacggcgaccagctttctctttatgctgttgctgtttttacgcatgagcaccaccgggctgactgcgcaggcttatggtgccaaaaatcctcaggcattagcccgtacgctggtgcaaccgttgctgttggcgttgggggctggggcgttaattgcgctgctgcgtacgccgattatcgatctggcgctgcatattgttggcggtagtgaggcagtcctggaacaggcgcggcgctttcttgaaatccgctggttaagcgcaccggcgagcctggcgaatctggtattactcggttggttactcggcgtgcaatatgcccgtgcgccagtaattttgttagtggtcggcaatatcctcaacattgtgctggatgtctggctggtgatggggctgcatatgaacgtgcagggcgcggcgctggcgacggttattgcggaatatgcaacattgctgattggtctgctaatggtgcgtaaaatcctcaaactacgcggaatttccggcgaaatgctgaaaactgcctggcgaggaaacttccgtcgcttgctggcgcttaaccgcgatatcatgctgcgtagcctgttgttgcaactctgtttcggcgcgatcaccgtacttggcgcgcgactggggagtgacattatcgctgttaacgcggttctgatgacgctactcacctttaccgcctatgcgctggatggttttgcctacgcggttgaagcgcactccggtcaggcatacggtgcgcgcgacggtagccagttgctggatgtctggcgggcagcgtgccgccagagcgggatcgtagcgttactgtttagcgtggtttatttgctggctggggaacacatcattgcgttactgacgagcttaacccagattcagcagctggctgaccgctatcttatctggcaggtgattttgccggtggttggcgtctggtgttatctgctggacggcatgtttataggcgcaacgcgtgccaccgaaatgcgtaacagtatggcggtggccgccgcaggttttgcgctgacgctccttacgctgccgtggctgggtaatcatgctttgtggctggcattaaccgtctttctggcgttgcgcgggctttctctggcggctatctggcggcgtcactggcgcaatggtacctggtttgccgcaacgtgacggttaaaaattctgaataaataatcctaagccaaattgctgactacacttaatctcacgttcagaagaaaagtgaacgtactctcattcacaacctaacgatgaggtcttgattatgaataaagatgaagccggcggtaactggaaacagtttaaaggtaaagtgaaagagcaatggggcaaactgaccgatgatgatatgacgatcattgaaggtaaacgtgatcaactggtcggtaaaatccaggaacgttatggttatcagaaagatcaggcagaaaaagaggtcgtggattgggaaacccgcaatgaatatcgctggtaattaatccctcctgcccgacgtgtacaaggatgtacgccctcttaacgcggtttctttttcacctgcacagagtgatcatgctggcactgttcaggatgacgacacgcttccacttctacacatgccgcacagagcccatgtgcttcaatcacattatgccgcagggcaaaccccatttttgccgccagcgtatgcataatgtcttccacgccttctgcacactcttctttcactgcgccgcagcgatcgcaaataaacatggcactcgtatgggtgggctgatcgaacagatgacagagcacataactgttggtggattccaccttatgcacaaaaccttgctcaagcagaaaatccagcgcgcgataaaccgttggcggcttggcttgcggttcagcttcgcgcagtaaatcaagcagatcataagcgctgatagcgccatcctgcagactcatcaggcgcaacacttccaggcgctgtggggtcaggcgcacattacgctgcgcgcagattttttcagcctgcgctaataactcctgcgttgtggtcttttccatcgggcacctcaaagtgggggttaagaatgtccttactttaccatgttccaggaaaaacaccgagaacccttattgttgccgtaatgttgattttctgctttgtaggtaaggtgttatgttgccttgtcgtaccattatcaacacgataataattaataattcatttttaaataaattgcttcaagttaactcgctatttatttaactgggtttaaacgcatacctgtagttcagaaattatgagcgatttttgatagtgaccagatggcaaaagaattataaggaggacacggtacgacaaaaaaggtagatgaatcatgttgaagataatacccggtgcaactggatactttaataaaacactcaatagtaatcaattcgataatgaagatgcaatcaaagataaattagataatagaggtagtatcaaaggtaaattaaataatatatatggtaaatctattgattatgcagcgctgcgtcatcgggatataattattgcaaaaatagatttgtttattcaacgaatcacgcataatttatggcatgcacgtaaaaaaatgtgtttttaattgtgcaaataaatgatctcaaaatgtgggtcaataagtatattgacgattgcactgatgaggatttaaacgatcgtgactttattgcaagtgttgttgaccgggctatttttcatttcgcgattaatagtatatgtaatcctggggataataaagatgcaatgcccattgaacaatgtacttttgatgtagaaactaagaatgaccttccctccacggttcagctattttatgaggaatctaaggataatgaacctttagcgaatatacattttcaagcaataggttctggttttttaacgtttgttaatgcctgccaggaacatgatgacaacagcttaaaattatttgctagcctgttaattagtcttagttattctagtgcctacgcagatttaagtgaaacagtgtatattaatgaaaataatgagagctacctgaaagctcagtttgaaaaattatctcaacgtgatatgaagaagtacctgggagagatgaagcgtctggctgatgggggagaaatgaattttgatggctatctggataagatgagtcatctggtgaatgaaggaacgctcgatcctgatattttaagcaaaatgcgagatgctgcaccacaattaattagcttcgcgaagagctttgacccaaccagtaaggaagagattaaaatacttacagacacttctaaattaatttatgatttgttcggggttaaaagcgagaaataatatgtgaagttcttcgatagtatggaaggcattatataaaaggacccaatatttattgggttcttttttctctatcaatactattagcagggagatatatcaccagagtttaatgtgtgattttttatttatcgtcgaacctggattgtttatcattggccttaacaaagttaacggctaataagattatttccatcacttcgtgagagcttcatgccttgagaggatctcaattttcttttgcaatgagacaggcgcttcctgttgttatggtatagtaccccgctattgagcctcctgaatagtgatgctgaataacataaccccatgatatatcgataaaataatctctacatttgaaaatgcacggtaattctgaaatgcaaaaaatcaaccaaaccagcgcaatgcctgaaaaaactgacgttcactggagtggtcggtttagcgttgcaccaatgctcgactggacggacagacattgccgctatttcttgcgtctgctttcccgcaatacgttgctgtataccgaaatggtgaccacaggggcgattattcacggtaaaggtgattatctggcgtacagtgaagaagaacatccggtagcgttgcaactgggcggtagcgatccggcggcgctggcgcagtgtgcaaagctggcagaagcgcgcggatatgatgagatcaacctgaatgtcggctgcccgtctgaccgggtgcagaacggcatgtttggtgcgtgtctgatgggtaatgcgcagctggttgccgactgcgtgaaagcgatgcgcgatgtggtgagcattccggtgacggtgaaaacgcgtattggcatcgacgaccaggacagctatgaatttctctgcgatttcatcaataccgtttccggcaaaggcgagtgtgagatgttcatcatccacgcacgtaaagcctggcttagcgggttaagcccgaaagaaaaccgtgaaatcccgccgctcgattatccgcgtgtgtatcaactgaagcgtgactttccgcatctgacaatgagcattaacggtggtatcaagagcctggaagaggccaaagcacacctgcaacatatggatggcgtgatggtcgggcgcgaggcgtatcagaatccgggtattctggcggcggtagaccgggagatctttggttccagcgataccgatgccgatccggtggcggtagtgcgcgccatgtatccgtacattgagcgtgaactcagccaggggacgtatctcggccatattacccggcatatgttgggcttgttccagggtattcctggcgcgcggcagtggcggcgttatttaagtgaaaatgcccataaagcgggtgcagacattaatgtgctggaacacgcgctcaaactggtggcggataagcgttaacttttcaccaaaaagtagtcaaattcaccacgccctgcgcaccgtcgcggggcgttttgctgttaaatcaatagattatttttggcatgattcttgtaatgccagcaagagatttcatatttgggagagcatcatgctggaactactttttgtgattggcttttttgtcatgctgatggtcaccggcgttagcttgctgggcattatcgccgcgctggttgtggcgacggccattatgttcctcggcggtatgctggcattgatgattaagttgctgccgtggttactactggcgattgcggtggtgtgggttattaaggcgattaaagcaccaaaagtgccgaaatatcagcgttatgaccgctggcgttactaagggattgtgcggatgatcacaacctaaggttttatccttagaacaaaataggaattgataatcaaatctgtcactattgcgcctctaacagattcatcgtgctgtaccctacatacagccgaactataaaaagaaagggcttcccaggtggaagccctatttcttttatggaatcagcaggctggaaccttgcgtcgcccggctttccagaatctcatgcgcacgctgcgcatccttcagcggatatttctgctgctcggcgacatcgaccttaatcacaccgctggcaatcaaagagaacagttcattactggcctcggttaattcctcccgcgtggtgatatagccttgcagggaagggcgtgtcacatacaagctgcctttttgattgagaatgcctaagttcacaccggtaaccgcaccactactgttgccaaaactgaccattaagccgcggcgttgcaggcaatccaggctccgttcccaggtgtctctgcccacggaatcgtacaccacgcgcactttcttaccgccggtgatctcttttaaccgctcgaccagatcctcttcacgatagttaataacctgccacgcgcccgcttttagcgcgctctgcgctttttgcgcggttcctacggtgccgataagtttcgcgcccagggcttttgcccactggcaggcaattaagccaacgccgccagccgctgcgtggaacaggaactgttcatcgggtttaatttcataggttttgcgcagcagataataaaccgttaagcctttcaggaaggatgccgcagcttgctcaaaagaaattgccgcaggcagaatcgccgctttatccgcaataatgttatgcacagagctgtaagcgcctaacgcgctctgcgcatagactacacgatcgcctgccttaatatgctttacaccactgccgactttactcacgatgcctgctgcttcggtgcctaatccgctgggtaggcttggcggcgggtaaaggccgctgcggatatatgtgtcgataaaattgatgccgatggctttattttcgacctggatttcattctccgccggatcggcaggagtgaactctacggcttgaagtacttccgggccaccgtgcttgtgaaattcaattcgtgttgccatgtgtcctccagaacgtatcgtcagggtctgcttcatatgataaagtttcgacccattctttatctcggtaactccattcactatggcaggaaataaacccttcaacaaacagcaggctgaaccccgcgaacgcgatccacaagttgccgggctgaaagtgcctccgcacagcatcgaagcggagcagagcgtgttgggcggtttaatgctagataacgaacgctgggatgatgtagccgagcgtgtggtagcagacgatttttacacccgcccacaccgtcatatctttactgaaatggcgcgtttgcaggaaagcggtagccctatcgatctgattactcttgcggaaagcctggaacgccaggggcaactcgatagcgtcggtggttttgcttatctggcagagctgagtaaaaatacgccaagtgcggctaacatcagtgcctatgcggacatcgtgcgtgaacgtgccgttgtccgtgagatgatcagcgttgcgaatgagattgccgaagctggttttgatccgcaggggcgtaccagcgaagatctgctggatctggctgaatcccgcgtctttaaaattgccgaaagtcgtgcgaacaaagacgaagggccgaagaacatcgccgatgtgctcgacacaaccgtggcgcgtattgagcagttgtttcagcagccacacgatggcgttaccggggtaaacaccggttatgacgatctcaacaaaaaaaccgctggcttgcagccgagcgatttgatcatcgtcgccgcgcgtccgagcatgggtaaaacaacatttgcgatgaacctcgtcgaaaacgcggcgatgttgcaggataaaccggtacttatcttcagcctggagatgccaagtgaacagatcatgatgcgttctctggcgagcctgagccgcgttgaccagactaaaatccgtaccgggcagctcgatgacgaagactgggcgcgcatttccggcaccatgggtattttgctcgaaaaacgcaatatctatatcgatgactcctccggcctgacgccaacggaagtgcgttcccgcgcacgccgtattgcccgtgaacacggcggcatcgggcttatcatgatcgactacctgcaactgatgcgcgtaccggcgctttccgataaccgtacgctggaaattgcagaaatctctcgcagcctgaaagcactggcgaaagaactgaacgtgccggtggtggcgctgtcccagttgaaccgttctctggaacaacgtgccgacaaacgcccggtcaactccgacctgcgtgaatctggctctatcgagcaggatgcggacttgatcatgtttatctatcgtgatgaggtgtatcacgaaaacagtgatttaaaaggcatcgcggaaattattatcggtaaacaacgtaacggcccaatcgggacggtacgcctgacctttaacggtcaatggagccgcttcgacaactatgcggggccgcagtacgacgacgaataataattattttatgaattaggtaattaaagcaaacacttatcaaggaacacaaatgcaagcggcaactgttgtgattaaccgccgcgctctgcgacacaacctgcaacgtcttcgtgaactggcccctgccagtaaaatggttgcggtggtgaaagcgaacgcttatggtcacggtcttcttgagaccgcgcgaacgctccccgatgctgacgcctttggcgtagcccgtctcgaagaagctctgcgactgcgtgcggggggaatcaccaaacctgtactgttactcgaaggcttttttgatgccagagatctgccgacgatttctgcgcaacattttcataccgccgtgcataacgaagaacagctggctgcgctggaagaggctagcctggacgagccggttaccgtctggatgaaactcgataccggtatgcaccgtctgggcgtaaggccggaacaggctgaggcgttttatcatcgcctgacccagtgcaaaaacgttcgtcagccggtgaatatcgtcagccattttgcgcgcgcggatgaaccaaaatgtggcgcaaccgagaaacaactcgctatctttaataccttttgcgaaggcaaacctggtcaacgttccattgccgcgagcggtggcattctgctgtggccacagagccattttgactgggtgcgcccgggcatcattctttatggcgtcagcccgctggaagatcgctccaccggtgccgattttggctgtcagccagtgatgagtctaacctccagcctgattgccgtgcgtgagcataaagccggagagcctgttggttatggtggaacctgggtaagcgaacgtgatacccgtcttggcgtagtcgcgatgggctatggcgatggttatccgcgcgccgcgccgtccggtacgccagtgctggtgaacggtcgcgaagtaccgattgtcgggcgcgtggcgatggatatgatctgcgtagacttaggtccacaggcgcaggacaaagccggggatccggtcattttatggggcgaaggtttgcccgtagaacgtatcgctgaaatgacgaaagtaagcgcttacgaacttattacgcgcctgactagtagggtcgcgatgaaatacgtggattaatcgttctgtaatatttgattgtctgtgccggatgcggcgtgaatgccttatccggccaataaaatcctaaaaattcaataagttgatgttctttcatgctcttataaaggtcgtgcctctggcggatgtacgtttgtcatgagtctcactctgttgctaattgccgttcgctcctgaacatccactcgatcttcgccttcttccggtttattgtgttttaaccacctgcccgtaaacctggagaaccatcgcgtgtttcaaaaagttgacgcctacgctggcgacccgattcttacgcttatggagcgttttaaagaagaccctcgcagcgacaaagtgaatttaagtatcggtctgtactacaacgaagacggaattattccacaactgcaagccgtggcggaggcggaagcgcgcctgaatgcgcagcctcatggcgctagcctttatttaccgatggaagggcttaactgctatcgccatgccattgcgccgctgctgtttggtgcggaccatccggtactgaaacaacagcgcgtagcaaccattcaaacccttggcggctccggggcattgaaagtgggcgcggatttcctgaaacgctacttcccggaaagtggcgtctgggtcagcgatcctacctgggaaaaccacgtagcaatattcgccggggctggattcgaagtgagtacttacccctggtatgacgaagcgactaacggcgtgcgctttaatgacctgttggcgacgctgaaaacattacctgcccgcagtattgtgttgctgcatccatgttgccacaacccaacgggtgccgatctcactaatgatcagtgggatgcggtgattgaaattctcaaagcccgcgagcttattccattcctcgatattgcctatcaaggatttggtgccggtatggaagaggatgcctacgctattcgcgccattgccagcgctggattacccgctctggtgagcaatagcttcagcaaaattttctccctttacggcgagcgcgtcggcggactttctgttatgtgtgaagatgccgaagccgctggccgcgtactggggcaattgaaagcaacagttcgccgcaactactccagcccgccgaattttggtgcgcaggtggtggctgcagtgctgaatgacgaggcattgaaagccagctggctggcggaagtagaagagatgcgtactcgcattctggcaatgcgtcaggaattggtgaaggtattaagcacagagatgccagaacgcaatttcgattatctgcttaatcagcgcggcatgttcagttataccggtttaagtgccgctcaggttgaccgactacgtgaagaatttggtgtctatctcatcgccagcggtcgcatgtgtgtcgccgggttaaatacggcaaatgtacaacgtgtggcaaaggcgtttgctgcggtgatgtaatgcaggaaagcaggctggagctacccagcctgcagtgaaattaaactgtcgtcgctttcactctttctttatagatgatttttttgatgccatcgttctacgtgagagataataaacgttgttagttcttttattgttaagcttatcccaattatctggaattccttatcctgtttttttgggtggagtaataatttctgcacatctaaccattattaaatttaataataagtatcgggtttgttacgatagaatatttctatatcctcaagaatatgctttgccttattgcctgtgactttctgagattcaattatagtatcgttaaattctaatgttaaagagaactcttttttccgctttgtgtaagtttaaccttatattgattaccaatatcaaataaaaaggtcctgtaatgagaataatcacctttaacctcctcggcaaaacagcaaagcgtgcaaatatacataaagtctttcttacccctgattttgttaactaaatcaataaatgcgtgaaaaactttacttgcaatagaacttgatacttcttctccaggtctaaaaaatcttttgcaatttttaactgtgtttctatgtataaaaagaaatctttggcataagagatatctttattatttagtgcatctagctcaacaggtaaagatgtcgttttgttgctattcacatatgatatattcatatcatcatctccatcgcgagtaataaaattaatcaccattgtagggtagggggctggtcaatcagaaatcatctttataaacttcgattgtttttgtaatgctgtatcattaagttcattaaatcgtacagcagataaatgttctatcaaatttcgctcatttgccgaggattcatcataataaacgtaaaattaatgtatccttacatcgagtaataaacattttttatacaaaaaaagacaggaacgtatttactgggttaaatataatcatcctgcttttcatcacaaaaaccgcagataatccttcctttccccggcagctggcgttatggtcagatggtttttgcaacaaatctcacaataaaaagtttcaacatactgactatttagggaaaaatatgcgcaagatcacacaggcaatcagtgccgtttgcttattgttcgctctaaacagttccgctgttgccctggccagttctcctagtccgcttaaccctgggactaacgttgccaggcttgctgaacaggcacccattcattgggttagcgtcgcacaaattgaaaatagcctcgcagggcgtccgccaatggcggtggggtttgatatcgatgacacggtacttttttccagtccgggcttctggcgcggcaaaaaaaccttcagcccagaaagcgaagattatctgaaaaatcctgtgttctgggaaaaaatgaacaatggctgggatgaattcagcattccaaaagaggtcgctcgccagctgattgatatgcatgtacgccgcggtgacgcgatcttctttgtgactggtcgtagcccgacgaaaacagaaacggttagtaaaacgctggcggataattttcatattcctgccaccaacatgaatccggtgatctttgcgggcgataaaccagggcaaaatacaaaaagccaatggctgcaggataaaaatatccgaattttttatggcgattctgataatgatattaccgccgcacgcgatgtcggcgctcgtggtatccgcattctgcgcgcctccaactctacctacaaacccttgccacaagcgggtgcgtttggtgaagaggtgatcgtcaatagtgaatactgacagagcgggagagcgtgatgctctcccgaatgctgtttttttaatcacacctttatcctttcgctgtcttgctgcaaactgattaagagagttttatcaaggagcagcacatgtggtatcaaaagacgctcacgcttagcgccaaatctcgtgggtttcatctggtaacggatgaaattctgaatcagctggctgatatgccgcgcgttaacatcggcttactgcatctgttgctgcaacatacctccgcctctctgacacttaatgagaactgcgatcccaccgtacgccacgacatggagcgttttttcctccgcaccgttcccgacaacggaaattatgagcatgactatgagggagcagacgatatgccttctcatatcaaatccagtatgctgggaacaagccttgtattgccggtgcataaagggcgtattcagaccggcacctggcaaggcatttggctgggggaacatcgcatccacggcggaagccgtcgcatcatcgcgacactacaaggggagtaaaaaatgaccattagcgagttgctacaatattgcatggcaaaaccaggcgcagaacagagcgtgcataatgactggaaagcgacgcagatcaaagtggaagatgtactgtttgcgatggtgaaagaagtagaaaatcgcccagctgttagcctgaaaaccagcccggagctggcggagctgctacgtcagcagcacagcgatgtgcgtccaagccgccatctgaataaagcgcactggagcaccgtgtatctcgacggtagcctgccagatagccaaatctattatctggtggatgcgtcttatcagcaggcggtgaatttactgccggaagaaaaacgtaaattgctggtgcaactctgaaaggaaaaggccgctcagaaagcggccttaacgattacagcatcggcttaaggaagcgtgccgtgtgacttgcttcgcactccgcgacggtttctggcgtaccggagacgaggatctcgccgccaccactgccgccttctggtcccaggtcgacaatccagtcagcggttttgatcacgtcgagattgtgctcaatcaccacaatggtgttgccctgatcgcgcagtttatgcagtacgtcgagcagttgctgaatatcggcgaagtgcagaccggtggtcggctcgtcgagaatatacagcgtctgcccggtgccgcgtttactcagttcacgcgccagcttcacgcgctgggcttcaccgccactaagggtggttgcggactgccccagtcgaatgtacgtcaggccaacgtccatcaacgtttgcagcttacgcgccagtgcaggtacggcatcaaagaactcacgcgcctcttcgatggtcatatccagcacttcgtggatggttttgcctttgtacttaatctccagcgtttcacggttatagcgtttacctttgcactggtcgcacggcacgtagatatccggcaggaagtgcatctccactttgatcacgccatcgccctgacaggcctcgcagcgtccgccacgaacgttaaagctgaaacgtcccggcgtatagccgcgcgcacgggattccggtacgcccgcaaacagttcgcgcacaggcgtaaacacgccggtataggtcgccgggttagaacgtggagtacgaccaattgggctttggtcgatatcgatcactttatcgaaatgctccagcccctgaatatcgcgatacggtgctggttcggcgatggtcgccccattcaactggcgttgggcaatcgggaacagtgtgtcgttaatcagcgtgcttttaccggaaccactaaccccggtgatgcaggtaaacagacccaccggcagcgtcagcgtcacgtccttcaggttgttgccgcgtgcgcctgtcagcttcagcactttttccggattcgccggaacgcgtttcttcggcacttcaatcttgcgtttgccgctcatgtactgcccggtcaagctctccggcaccgccataatcgcttccagcggaccttctgcgaccacttcaccgccgtgaacacctgcgcccgggccaatgtcgatcacatggtcagcggcgcgaattgcgtcttcgtcgtgctccaccacaatcacggtattaccgagatcgcgcagatggataagcgtacccaacaggcgctcgttatcacgctggtgcaggccgatagacggctcgtccagcacgtacataacgccaaccaggcccgcaccaatctggctcgccagacggatacgctgtgcttcaccgccagaaagcgtttctgcgctgcgggaaagcgtcaggtaattcaggccgacgttaacgaggaatttcagacgatcgccgatctctttaaggattttttctgcaatcttcgcccgctgacctgcgagtttgagattgttgaagaattccatcgcatgaccaatgctcatgtcggagatagcaggcagcggcgtattctcgacatacacgtggcgcgcttcccgacgcagacgcgtcccttcgcagctggcgcacggacgattactgataaacttggctaattcttcgcgtaccgcgctggattccgtctctttatagcggcgctccatattatgcagcacgccttcgaacggatgacgacgaatggaggtatcgccacgatcgttcatgtatttgaattcaatgttttctttgccagaaccgtacaacaccactttatgcacgttcgcgctcaggctgccccacggcgcttcgacgtcgaacttatagtgatctgccaggcttttcagcatctggaaataatagaagttgcggcgatcccagccacggatcgcaccaccagccaggctcagttccggattctggatcactcgatcaggatcgaaatattgctgtacgccaaggccgtcgcaggtcgggcaggcccccgccgggttgttaaagctaaacagtcgcggctccagttcacgcatactgtagccgcaaattgggcaggcgaagttggcggagaacagcagctcttccgctttcgggtcgtccatatccgccactaccgcggtaccaccggaaagctccagcgcggtttcaaaactctcggcaagacgttgggtaagatcgtcacgcaccttgaagcgatcaaccaccacttcaatggtatgtttcttttgcagttccagttttggcggatcggaaagatcgcagacttcgccatcaatacgagcacggatgtagccctggcttgccaggttctccagcgttttggtgtgttcgcctttgcgctctttaatgattggcgcgagtagcatcagacgcttgccttccggctggctcagcacgttatccaccatctggctgacggtttgcgccgccagcgggacgtcgtggtccggacagcgcggctcgccaacgcgggcgaataacaaacgcaaatagtcgtggatttcggtgattgtccccaccgtagaacgcgggttatgagacgtgcttttctgctcaatactgatggcaggagaaagcccctcaatatgatcgacgtccggcttttccatcagactcagaaactgccgcgcgtaggcggaaagggattcaacgtaacggcgctgcccttcggcatataaggtgtcgaaagcgaggctggatttgccagaaccgctaagcccggtcacgacaatgagcttgtcgcgggggataacgaggttgatgtttttgagattatgggtgcgggcgccccgaacttcgatcttatccattcacctttcccggattaaacgcttttttgcccggtggcatggtgctaccggcgatcacaaacggttaattatgacacaaattgacctgaatgaatatacagtattggaatgcattacccggagtgttgtgtaacaatgtctggccaggtttgtttcccggaaccgaggtcacaacatagtaaaagcgctattggtaatggtacaatcgcgcgtttacacttattcagaacgatttttttcaggagacacgaacatggccagcagaggcgtaaacaaggttattctcgttggtaatctgggtcaggacccggaagtacgctacatgccaaatggtggcgcagttgccaacattacgctggctacttccgaatcctggcgtgataaagcgaccggcgagatgaaagaacagactgaatggcaccgcgttgtgctgttcggcaaactggcagaagtggcgagcgaatatctgcgtaaaggttctcaggtttatatcgaaggtcagctgcgtacccgtaaatggaccgatcaatccggtcaggatcgctacaccacagaagtcgtggtgaacgttggcggcaccatgcagatgctgggtggtcgtcagggtggtggcgctccggcaggtggcaatatcggtggtggtcagccgcagggcggttggggtcagcctcagcagccgcagggtggcaatcagttcagcggcggcgcgcagtctcgcccgcagcagtccgctccggcagcgccgtctaacgagccgccgatggactttgatgatgacattccgttctgatttgtcattaaaacaataggttatattgttttaaggtggatgattaaagcatctgccagccataaaaaagaagcctccgttatggaggcttctacgtatcaggtcaaaatcattggccattgtggcggtgtctgattcatctcttctatcatcacgctctcgatgttgtgccagatagcggtgatgtccgccattgtgatgccaagcaaccccattgcgaaccaacaggcggaaacaacgcccagaccgctgctgatcaccgcaagcccgacataatcagaccgacgaaaacggatgttgagtgtgctggccagaaacatcattacggcactaagaagttgccagcgaagaagaaccacgccagtggtgagggtagccatcaaacaattcctctgaaaagagccgatgccctggacagcgcggcgttgttcacgggaggcgtggtacactctggctatcgcggggcttgcagaacacaaaaatgaaacactctgtttgtttcattaattttgtgaactatatcacaattgattgtttgttagccatattaggccgtgacttttattgctgtacagattatgtggtttttcagtggcattaagggcatatcttcccgccgcctctgcattcctgtaggaaattaattttgaatatcaatgaattattttcatccaggtgacgattagaaaggtatcaatttcaaatcaggcaaaagtgctatttataccgtaagatttatctaaagacgtcggtacccagggttttcaccttgcaatggccgggtataaacaggcaggaaattgatagcaatgagtcatcgtgcacgacaccaattactggcgttgccgggcattatctttttagttctctttcccatcattcttagcctatggattgccttcctttgggcaaaaagtgaagtgaataatcagctccgaacctttgctcaactggcactggataaatccgagctggtcattcgccaggcagatttagtgagcgatgcagctgaacgctatcaggggcaagtttgcactccagcccatcaaaagcgaatgttgaatattattcgtggctatctttatattaatgaattgatctatgcccgtgataaccattttttatgcagtagcctgatagcgcctgtaaacggctatacgattgcaccggccgattataagcgtgaacctaacgtttctatctattattaccgcgatacgccttttttctctggctataaaatgacctatatgcagcggggaaattatgtggcggttatcaaccctctcttctggagtgaagtgatgtctgatgacccgacattgcaatggggtgtgtatgatacggtgacgaaaacctttttcagcttaagcaaagaggccagcgcagcaacgttttctccgctgattcatttgaaggatttaaccgtacaaagaaatggctatttatatgcgacagtttatagcacaaaacgcccaattgcagccattgttgcgactagttatcaacgtcttataacccatttttataatcatcttatttttgcgttgcccgccggtattttggggagtcttgttctgctattactctggctacgtattcgacaaaactatttatctcccaaacgtaaattgcaacgcgccctcgaaaaacatcaactttgtctttattaccagccaataatcgatatcaaaacagaaaaatgtatcggcgctgaagcgttgttacgttggcctggtgagcaggggcaaataatgaatccggcagagtttattccgctggcagaaaaggaggggatgatagaacagataactgattatgttattgataatgtcttccgcgatctgggcgattacctggcaacacatgcagatcgctatgtttctattaacctgagcgcctccgattttcatacgagtcggttgatagcgcgaatcaatcagaaaacagagcaatacgcggtgcgtccgcagcaaattaaatttgaagtgactgagcatgcatttcttgatgttgacaaaatgacgccgattattctggctttccgccaggcaggttacgaagtggcaattgatgattttggtattggctactctaacttgcataaccttaaaagtttgaatgtcgatattttgaaaatcgacaaaagctttgttgaaacgctgaccacccacaaaaccagtcatttgattgcggaacacatcatcgagctggcgcacagcctggggttaaaaacgatcgctgaaggcgtcgaaactgaggagcaggttaactggctgcgcaaacgcggcgtgcgctattgccagggatggttctttgcgaaggcgatgccgccgcaggtgtttatgcaatggatggagcaattacccgcgcgggagttaacgcgcgggcaataaaattacaggcggtggcgataatcgctgggagtgcgatcaaactgccgacggaaaacgcgggagaaggtctgctggctgacataacccaggtccattgcgatatcaaaaatcggacgctcggtggtgcgcaactcaacggcggccagtaacaggcggcgttggcgaatgtaatcgccaagcgtctgatgcgtcaccgtgcggaacattcgttgcaagtaccacttactatagccacttttttttgcgactacatcaatgttaagcggctggtcaatatgctcgtcaatccatgcgataagatcctgaataattttctgatgggacataaatctgcctcttttcagtgttcagttcgttaattcatctgttggggagtataattcctcaagttaacttgaggtaaagcgatttatggaaaagaaattaccccgcattaaagcgctgctaacccccggcgaagtggcgaaacgcagcggtgtggcggtaagcgcgctgcatttctatgaaagtaaagggttgattaccagtatccgtaacagcggcaatcagcggcgatataaacgtgatgtgttgcgatatgttgcaattatcaaaattgctcagcgtattggcattccgctggcgaccattggtgaagcgtttggcgtgttgcccgaagggcatacgttaagtgcgaaagagtggaaacagcttagctcccaatggcgagaagagttggatcggcgcattcataccttagtggcgctgcgtgacgaactggacggatgtattggttgtggctgccttagccgcagtgattgcccgttgcgtaacccgggcgaccgcttaggagaagaaggtaccggcgcacgcttgctggaagatgaacaaaactaaagcgccacaagggcgctttagtttgttttccggtctttgtctttctctctatcccgctggtacacaggagggtttcccccgacgtcaacacacctcattcgagcacgtggtggaggttccggttggtgttgatgctttaattgtatgtcaccgacgtttcttcgccagtgtaaaagtatactttttaaccgcaatatttttgtcatctcagacgattttttatcgcaatcctgaacggtatacggctcgataacgctgcaatcttgcgcaccgacgataacgtttgcgcatcaattgcctggtttttcatcgtcaagacaataaaagagaaaaaagcagcaaacttcggttgaaaaagccgctatgatcgccggataatcgtttgctttttttaccacccgttttgtatgcgcggagctaaacgtttgcttttttgcgacgcagcaaattgtcgcaaacctggagcaggaagataacgtttcgctggcaggggattgtccgccacgcatcttgacgaaaattaaactctcaggggatgttttcttatgtctacgccaagtgcgcgtaccggcggtagtctcgacgcctggtttaaaattagtcaacgtggaagcactgtccgtcaggaagtggttgccgggttaacaacgtttctggcgatggtctacagcgtcatcgtcgttccaggtatgttgggtaaagcaggcttcccgcctgcggcagttttcgttgcaacctgtctggttgccggactcggttctatcgtgatgggtctgtgggctaatctgccgttggcgattggttgcgccatctccctgacagcgtttaccgcattcagcctggtgctggggcaacatattagcgtacctgtcgcgctgggtgccgtgttcctgatgggtgtgctgtttacggtaatttctgccacgggtatccgtagctggattttgcgcaacttgcctcacggtgtggcgcacggcacggggattggtatcggtctgttcctgctgctcattgccgctaacggtgtcggtctggtgattaaaaacccgcttgatggtctgcccgttgcgctgggtgatttcgcgaccttcccggtgattatgagtctggtaggtctggcggtgatcatcggcctggaaaaactgaaagtccctggtggcattctgctgaccattatcggtatcagtattgtcggtttgatcttcgatcctaacgtccatttctccggcgttttcgccatgcctagtttgagcgatgaaaacggcaatagtctgattggcagcctggacattatgggcgcgctgaatcctgtagtcctgccaagcgttctggcgctggtgatgacggcagtatttgatgccaccggaactatccgtgccgtcgccggccaggcgaacctgctggataaagatgggcagatcatcgacggtgggaaagcactgaccactgactccatgagcagcgttttctctggcctggtgggtgcggctccggcagcggtatacatcgagtctgcggcgggtacggcggcgggcggtaaaaccggtttgacggctatcaccgttggcgtgctgttcctcctgattctgttcctctctccgctctcttacctcgttccggggtatgcaacggctccggcgctgatgtacgttggcctgctgatgctgagcaacgtggcgaaaatcgactttgctgattttgttgatgcgatggcgggtctggttacggctgtattcatcgtgctgacctgtaacatcgtaacaggcatcatgatcggcttcgcgactctggtgattggtcgtctggtttccggcgaatggcgcaagttgaacatcggtacggtcgttatcgccgtggcgctggtgaccttctatgcgggtggctgggctatctaatctttcatcggattctgaaaacgggtggcaatggctgcccgtttttattttctccgcacattgtgtgagcttttgcgatattctgaaaaaaatgagaattcaggcataacgtctttctcagatcataaaaaacatcgcaaacagggaacgcatggaaatcttcttcaccatactgataatgaccctcgtggtcagcctgtccggggtggtcactcgtgtcatgccctttcagatcccgcttccgcttatgcaaatcgccatcggtgcgctactggcgtggccgacgtttggtttgcatgtggagtttgatcctgaactctttttagtcttgtttatcccgccgttgctgttcgctgatggctggaaaacgccgacccgtgaatttctcgaacatggtcgagagattttcggcctcgcgctggcgctggtggtggtcaccgtggtcggcattggcttccttatttactgggtggtgccgggcattccgctgatccctgcctttgcgctggcggcggtgctttctccgaccgatgctgtggcgctctccgggattgttggcgaagggcgcatcccgaaaaaaatcatgggcattttgcagggcgaagcgttgatgaatgacgcctccggtctggtgagcttgaagtttgccgtagcagtggcgatggggacgatgatcttcaccgtcggcggtgcgacggtcgaatttatgaaagtagccattggcggtattctcgccggttttgtggtgagctggctgtacggtcgcagcctgcgattcctcagccgctggggcggtgatgaacccgcgacgcagatcgtcctgctgttcctgctgccattcgcttcttatctgattgccgaacatattggcgtttccggcatcctcgctgcggttgccgccgggatgaccatcacccgctccggtgtgatgcgccgtgcgccgctggcaatgcgcctgcgtgcaaacagcacctgggcgatgctggaatttgtctttaacggcatggtgttcctgctgttaggtctgcagctgccgggtattctggagacgagcctgatggcagcagaaatcgaccctaacgtcgaaatctggatgctgtttaccaatattattctgatatatgcggcgctgatgctggtccgtttcggctggctgtggacgatgaaaaagttcagcaaccgcttcctgaagaagaagccgatggagtttggtagctggaccacacgagaaatcctgatcgcgtctttcgccggggtgcgtggggcgatcactctggccggtgtgctctctatcccgctgctcttgccggatggtaacgtcttcccggcgcgctatgagctggtgttcctggcggctggcgtcattctcttcagcctgtttgtcggcgtggtgatgttgcctattctgctacaacacattgaagtcgcggatcatagccaacaattgaaagaggaacgtattgcgcgagcggcaacggcagaagtggcgattgtggcgatccagaaaatggaggagcgtctggcggcggataccgaagagaatatcgataaccagctgcttacggaggtcagttctcgcgtcattggtaacctgcgtcgtcgcgccgatggacgtaacgacgttgaaagttccgtgcaggaagagaaccttgagcgtcgcttccgtctggcggcattgcgttctgaacgtgctgaactttaccacctgcgcgccacacgggagatcagcaacgaaacgctgcaaaaattactgcacgatctcgatttgcttgaagcgttgctaattgaggaaaatcagtaagccgaaagcgacgtaaccaggcccgaggtaatctgaaaaaggtgcaatcttttgcacctttaacaggttagctcgggctaacattcatgattctaaaacaaataaattatctctcttttaaagtcaattcattggctgttcttcgacttaacctcaatctgcatcttgcataatatctgcagtaatcttcatagcgactgcatgaagattatcctcagtttgactcatgccagtatgagtggcacaatcttcttcaaagaatttctgtagtgttaccaggatatcactattaatggagatattttcctcaccacggagaatggtaatacccattccctggacgctagcctcatcgaaattaacacgatagagacggatattaaacatccaggcttttgttaaaacagaacagttgaaatggcaattgcttaaattggcattattaaaattaacattagccatattagagtcggtacatataaccatttcgaggaacgtatttgttaaccgcgtaaaaaagagtttgctatcaattaagtttatattctggagggttgctttattcaggttgacacgagacagatcagcatgttcaaagttaattaaatcaagtttagagaagctaaggtcggctctaaataaattaatatatggcgctattactttataaagatttacctcagccatgtatgccatataaaaattactataatcaaggaaggtatttttaatattggctctattcattgttgcattgtagaattgaacatgcatagcggaacaactatttagagttccgtcagtcatttttatctgagcgaaattactgtcatcgagaatacaattatcaaaaagtattttttccattatggcgaaattaaaattcgttttatacatattacagtcctgaaaaatagcgttttgtagtctgcaacctgcaaaattgctattggataaatcttcatctttaatcacgatacctttcaggctaaggtgactaaaatcgtaaccaccatttactgtctgtgggatttcgatagtattattatggacggtgacattatttataaaatataccaccttaatactcacttccttatctttattaaggtaaactcttctcgtaattctatcgtcacatttattatttgcatgactagctatatctataaaatatttatgtattttcctgtccgtttctttcgtgatttttccacttggtaaactatcataaattcttttcattttctgaatcaagcctatcactttttcatgatcatccattttgaaaagagagagggctttattgtcaattaacgtgtttttatgatgtttgctgtaattatcactttttgttttctttgtatgacttggacttgtgacagagtggttatcgttaatcaggcaaagagggaaaaacatattatttaaaccattatagcgcataaaatatccttataattaacaagaaagaaaaggcatattctctgcattatcattttctacgactgtcaaaaatcgctcattttttaatgagtttatttgtttaatattatgggaaaaggtgatgcatttgggagaggaagagtattccccggtcagacgaccggggaaggggagagattaatgcgcgcggccttgctcaacgccaaagccggtctgggagcggataaactgcgcgcggaacagttcacgctcacgcgcgccttccgcactgttatcggttgcgctgaagaaccagatgccgaggaatgccacggtgatagagaacagcgccgggtattcatacgggaagatggctttttcgtgaccaaggatctgtacccaaatcgtcgggccgaggatcatcagtactactgcggtaatcagccccagccagccacccatcatcgcgccacgcgtggtcagtttgctccagtacatagaaagcagaatgatcgggaagttacagctcgccgcgatggcaaacgccagccccaccataaaggcgatgttctgattctcaaacagcacgccgaggataatcgcaatcacgccgaggatcagtacggtgattttacttacccgcagctcttcacgttcggtcgcgccttttttgaagacgttagcgtacaagtcatggctaaccgcggatgcgcccgccagcgtcagacccgcaaccaccgcgaggatagtggcgaaagcaaccgcactaataaaaccgaggaacaggttgccgcccactgcattcgccaggtgaacggccgccatgttgttaccaccaatcagatggcccgccgcgtctttatattccggattcgcaccaaccagcatgatcgcgccgaagccgataataaaggtcagaatatagaagtagcccataaacccggtggcgtagaacacgctcttacgtgcttcgcgggcatcgctgactgtaaagaagcgcatcagaatgtgcggcaagcccgccgtaccaaacatcagtcccagacccagagagagcgcggagatcggatctttcaccagcccgcccggcttcatgatgtcgacacctttcgggtgtaccgccatcgcttcactgaacagattgttgaagctaaagccgacgtgtttcatcaccataaaggccataaagctggcaccgaacagcaacagcacggctttgataatttgcacccaggtggtcgccagcatgccgccgaacaggacgtacatcatcatcagcacgccgaccagcaccaccgcaatgtgatagttaaggccaaacagcagctcgatcagtttacctgcgcccaccatctgggcgataaggtaaagcgccaccaccaccagagaaccacaggcgctaagaatacgaatcggcccttgtttcagacggtaagaggccacatcggcaaaggtgtagcgccccaggttacgcagacgttcggcaatcaggaacaaaatgatcggccagcccaccaggaagcccaggctgtaaattaagccgtcatagccggaggtaaacaccagcgcggagatccccaagaaactggcggcggacatatagtccccggcaatcgccagcccgttctggaagccagtgatattgccgcctgcggtgtagtagtcgctacgagaacgtacgcgtttacttgcccagtaggtaatgccgagcgtaaacacgacgaaaatcaggaacataataatcgcctgccagttcgttggctggcgctctacggccccgctaatagcatccgcggcgttagctgcgaaagggagtgtggcggcaagcgccgtcagaactcttttcatgatgcttgtacctcatgcagttatttcaacttgcttgtacctcatgcaggacttcattattaagacggtcgaattcgccgttcgcccgccagatgtagataccggtgagaacaaaggagatcacaatcactccaacaccaattggaataccgcgtgtgacgctggtgttcggattcagcggcgtgcccagccagccgggcgcgaaggcgatcagtaaaataaagccgatataaactgccagcataataatgctcaggatggtggcaaaccgttgccgtttttcgactaactccctgaaatgcgcattgtcttctatccgctgataaatagtgccattcatcacagattctccagaggtaatgtagggattgttttaattcccgctcccttatgggagaaggttaacgctcgggtaacccttgccgaatgtaggccggataaggcgtttacgccgcatccggcaatcaatgcctgatgcgacgctgtcgcgtcttatcaggcctacaaaccgttaccgactcgcatcgggcaattgtgggttagcttggcatcgcgatagcctgcttctcttcaagcagcttctcgactacgccaggatcggcaagcgtgctggtatcgcccaggttgctggtatcgcccgccgcaattttgcgcagaatacggcgcataattttgccggagcgggttttaggcagggagtcggtccagtgcagcacgtctggcgtcgccagcgggccaatctctttacgcacccagttgcggacttctgcgtacagttctggactcggttcctccccgtgattaagcgtgacgtaggcgtagatcgcctgacctttaatattgtgcggaatacctactacggcggcttcggcaatcttcggatgcgccaccagcgcgctctcaatctctgccgtccccagacggtgaccggagacgttcagcacgtcgtccacacgcccggttatccagtaatagccatcttcatcgcgacgcgcgccgtcgccgctgaaatacatatttttgaaggtggagaagtaggtctgttcaaaacgttcgtgatcgccaaacagcgtacgcgcctgacccggccaggagtcggtgattaccaggctaccttcggtggccccctccagcgggttaccttcgttatcgaccagcgccggttgcacgccgaagaacggacgtgttgcgctaccggctttcagctcggtagcgccaggcagcggggtgatcatgaaaccgccggtttcggtctgccaccaggtatcgaccaccggacatttctcgttgccgatttttttccagtaccactcccacgcttccgggttaattggctcgcccacggaaccgagaatgcgcaggctgctacggtcggtgccttcgatcgctttatcgccttccgccatcagcgcgcggatcgccgtgggtgcggtatagagaatattgacctgatgcttgtccaccacctgcgccatacgggcaggcgtcggccagttgggtacgccttcaaacatcagcgtggtcgcaccgcaggccagcgggccgtacagcaagtaactgtgtccggtcacccagcccacatcggcggtgcaccagtagatatcacccggatgataatcaaagacatatttaaaggtcagcgccgcgtacaccagataaccgccggtagtatgcagcacaccttttggcttaccggtagaaccggaggtgtagagaataaacagcggatcttcggcgttcatctcttccgcctggtgctgatcgctcgcttgctcaaccaggtcgtgccaccacaggtcgcgcccttcctgccagtcaattttcccgccagtacgcttcagtaccaccacatgctctacgctggtgacgttcgggtttttcagcgcgtcatcaacgtttttcttcagcggaatactgcgcccggcacgcacaccttcgtcggaagtgatcaccagtcgactgttggaatcaataatgcgcccggcaacggcttccgggctgaagccgccgaaaatcacgctatgcaccgcgccaatgcgggcgcaggccagcatcgcaaccgcggcttccggcaccatcggcatataaatcgccaccacatcaccttttttaatgcccagctcgagcagggtattggcgaagcggcagacgtcgcggtgcagctctttatagctgatatgtttgctctggctggcgtcgtcgccttcccagatgatggcggtacgatcgccgttttcttgcagatggcggtcaaggcagtttgccgccagattcagcgtgccgtcctcgtaccatttaatggacacattaccgggggcaaaggaggtgtttttcaccttctggtaaggtttgatccagtcaagaatttttccctgttcgccccagaaggtatcaggtacgttaatagattgttgatacatcgcctcgtactgctgagggtttatcaggcaacggtctgcgatgttggcaggaatggtgtgtttgtgaatttggctcatgcttttgttctccttgtaggatgttaataatatgtggcataagcgttaaatgtaggggtattggcagttttgtttagtatttgggcgacagatcacgcaaaagtagaattgtgcaaataaacggcagggtaatttttgaaggtcagcaacaaaagttgattaattctttgaggaacatgcagttatgcatgctgttgaaaaagaggaagatactgactaactctaaagtggtattttacatgcacttacaattgattaaagacaacattcacagtgtggttatttgttacacataggggcgagcaatgtcatgacagtgtaggtgcggttactgtcgtgaaaaacaataaaaaccgccattgcaacaatggcgcaattcggatgaagcccctatgacaaggataaaaataaacgcacgccgtatcttcagcttattgattccttttttctttttcacttctgttcacgctgaacaaacggctgctcccgcaaaacctgtaactgtggaagcgaagaatgaaacctttgccccgcagcatcccgatcaatatctctcctggaaagccaccagcgaacagagtgagcgtgttgacgccctggcggaagatccacggctggtgatcctgtgggcggggtatcccttcagccgcgattacaacaagccgcgtggacatgcttttgctgtgaccgatgtgcgtgaaaccctgcgtaccggtgcgccgaaaaacgctgaagatggtccgctaccgatggcatgctggagttgtaaaagcccggatgtggcgcgtctgatccagaaagacggcgaagatggctacttccacggtaaatgggcgcgcggcggtccggaaatcgtcaacaacttaggttgtgccgattgccataacaccgcctctccagagttcgccaaaggcaaaccggagttaaccctttcccgtccgtatgcggctcgcgcgatggaagccattggtaaaccttttgagaaagccggacgtttcgaccagcaaagcatggtttgcggtcagtgccatgtggagtattacttcgacggcaaaaacaaagcggttaaattcccgtgggatgacggcatgaaagtcgaaaatatggagcagtattacgacaaaattgccttctctgactggactaactccctgagcaaaacgccaatgctgaaagcgcagcacccggaatatgaaacctggacagcgggcattcacggtaaaaacaacgtgacctgtatcgactgccatatgccaaaagtgcagaacgccgaaggcaaactctacaccgaccataaaattggtaatccgtttgataacttcgcccagacttgtgcgaactgccatacccaggacaaagctgccttgcaaaaagtggtcgcggaacgtaagcagagcattaacgacctgaaaatcaaggttgaagatcaactggttcacgctcacttcgaagcgaaagcagcgctggatgcaggcgcgacggaagctgaaatgaagccaattcaggacgatatccgtcatgcccagtggcgctgggatctggcgatcgcttcccacggcattcatatgcacgcaccggaagaaggtttacggatgctcggtacggcgatggataaagcggcggatgcacgcaccaaactggcgcgcctgctggcgaccaaaggcatcacccatgaaatccagatcccggatatcagtaccaaagagaaagcccagcaggccattggcctgaacatggaacaaatcaaggccgagaagcaggacttcatcaaaacggtgatcccgcagtgggaagaacaggcacgtaaaaacggtctgttaagccaataaccccgttccgcctcgcaaggggcggaaaacacaatggagtgaatatgagcgtattacgtagcttattaactgccggggtgctggcgagcggcctgttgtggagcctgaacggaattaccgctacccctgcggcgcaggcatctgatgatcgctacgaagttacccagcagcgtaacccggatgccgcctgtctggactgtcataaaccagataccgaaggtatgcatggaaaacatgcttccgttatcaacccgaataacaaactgccggtcacctgcaccaactgtcacggccagccaagtccgcaacaccgcgaaggggtgaaagatgtgatgcgctttaacgagccgatgtacaaggttggagagcagaacagcgtctgtatgtcctgtcatctgccggaacagttgcaaaaagcgttctggccgcacgatgtccacgtaaccaaagtggcgtgcgccagctgccattccctgcatccacagcaagatacgatgcagacgttaagtgacaaaggacggattaagatttgcgtcgattgccacagcgatcagcgcaccaatccgaactttaacccggcgtctgttccgttgcttaaggagcagccatgacctggtctcgtcgccagtttctcaccggcgtcggcgtgctggcagccgtcagcggcaccgcagggcgcgtggtggcgaaaacgttgaatatcaatggggtgcgttacggcatggtgcatgacgagagcttatgcatcggctgtaccgcctgtatggatgcttgtcgggaagtgaacaaggtgccggaaggcgtcagccgcctgacgattattcgtagcgagccgcagggcgaatttcctgatgtgaaatatcgcttcttccgtaagtcttgccagcactgcgatcatgcgccgtgcgttgacgtctgcccgaccggtgcgtcttttcgcgatgctgccagtgggattgtcgatgttaatccggatctctgcgtcggttgtcagtactgcatcgccgcctgtccgtaccgcgtgcgctttatccatccggtcacgaagacggcggacaaatgcgatttctgccgtaagaccaatttgcaggccggtaagttgcccgcgtgcgttgaagcttgcccgaccaaggcgctgacgtttggcaatctggacgatcccaacagtgagattagccaactgctgcgccagaagcccacttaccgctacaagctggcgctgggaaccaaaccgaagctgtaccgcgtaccgtttaaatacggggaggtgagccaatgacgcagacttccgcatttcattttgaaagcctggtgtgggactggccgattgccatctacctgtttttgattggtatttctgctggtctggtgacgctggccgtgctgttacgtcgcttctacccgcaggcgggcggtgcagacagtacgttgctgcgcaccacgctgattgtcgggccgggcgcggtgatcctcggtctgttgatcctcgtcttccacctgacaagaccgtggaccttctggaagctgatgttccactacagttttaccagcgtgatgagcatgggggtgatgctgtttcagctctacatggtggtgctggtgctgtggctggcgaaaatctttgaacatgatttgcttgccctgcaacaacgctggttgccgaagctggggatcgtgcaaaaggttctgagcctgctgacgcccgttcatcgcggactggaaacattgatgctggtgctggcggtgttgttgggggcttataccggctttctgctgagcgcgctgaaaagctatccgttcctcaataacccgatcctgccggtgctgttcctcttctccggcatcagctccggtgcggcggtggcgctgatcgccatggcgatacgccaacgcagtaacccgcattccacggaagcgcagtttgtacaccgtatggaaatccctgtggtatggggtgaaatcttcctgctggtggcgttttttgtcggtctggcgctgggcgatgacggtaaagttcgtgcgctggtggcggcattaggtggcggtttctggacgtggtggttctggcttggtgtcgccgggctggggctgattgtgccaatgctgctcaaaccgtgggtcaatcgcagttccggcattcctgccgtgctggcggcgtgtggggccagtctggtcggcgtgttgatgctgcgctttttcattctctacgccggacagttgacggtggcgtaagccagaaaagaggtggtttctggacgtattccttcctgaagtcggttttctggcgttgttgttaagtctcggggtcaacgtgttgaccccgttgacggccttcgcgggagtgcggttgcgctggcctgccatgatgcgactcacttgcatcggcattctggcgcagttcgcgctcctgctgctcgcctttggcgtactgacgtattgttttctcatcagcgatttcagcgtcatttatgtcgcgcaacatagctatagcctgctgagctgggaactcaagctggcagcggtgtggggcggccatgaaggtagcctgctgctttgggtgctgctgctttccgcctggagcgcgctgtttgcctggcattatcggcagcaaaccgatccgctatttccgctgacgttagccgttttatctctcatgctcgccgcactgctactgtttgtggtgctgtggtccgatcccttcgtgcggatatttccaccagcaatcgaaggccgcgatctcaatccgatgctgcaacatcccggtcttatctttcatccaccgctgctttaccttggctatggcggtttgatggtagcggcgagcgtggcgctggcgagtctactgcgcggcgagtttgatggtgcctgcgcccgaatttgctggcgctgggcgttacctggctggagtgcattaacggcggggatcatcctcggttcctggtgggcctactgcgaactcggctggggcggctggtggttctgggatccggtggaaaacgcctctttattaccctggctttctgccactgcgctgctgcacagtttgtccctgacacgccagcgggggattttttgccactggagcctgttgctggcgatagttactctgatgctgagcctgctgggcaccttaattgtccgttctggcattctggttagcgttcatgcgttcgcgctggataacgtccgcgccgtgccgttgttcagcctgtttgcactgattagccttgcgtctctggctctgtatggctggcgagcgcgggacggtggcccggcggtgcattttagcgggttaagccgggaaatgttaatcctcgctacgctgttgctgttttgcgcagtgctactgatcgtgctggtgggaacgctttatccgatgatttacggcctgctgggctggggacgcctctccgttggcgcgccgtattttaaccgcgcgacgttaccgtttggtctgttgatgctggtggtgattgtgctggcgacgtttgtctctggcaaacgcgtgcagcttccggcgctggtagctcatgcgggcgtgctgttatttgccgctggggtcgtggtctccagcgtcagccgtcaggagatcagcctgaatttacagccgggtcagcaggtgacgctggcaggatacaccttccgttttgagtgcctcgatctacaagccaaaggcaattacaccagcgaaaaagcgatagtggcactgtttgaccatcagcaacgcattggtgaactgacgccggagcggcgtttttatgaagcacgccgtcaacaaatgatggaaccgagtattcgctggaacggcatccatgactggtatgcggtcatgggggagaaaactgggccggatcgttacgcttttcgtttgtatgtacaaagcggtgtgcgctggatctgggggggaggattgttgatgattgcgggcgcattgttaagcggatggcgggggaagaagcgcgatgaataaagggcttctcacgctactgctgttatttacctgttttgcgcacgctcaggtcgtagacacctggcaattcgccaatccgcaacaacagcaacaggcgttaaatattgccagccagttacgttgtccgcagtgccagaatcaaaacttactggaatccaacgcgccggtggctgtcagtatgcgccatcaggtttacagcatggtggcggaggggaagaacgaagtcgaaatcattggctggatgaccgaacgctacggagattttgttcgctataacccaccgttaacgggtcagacgctggtgttatgggcgctgccagtggtgttgttactgctgatggcactgatcctctggcgagtgagggcgaagcgatgaaacagcccaaaataccggtgaaaatgctgacaacactcacgatattgatggtatttctctgtgtcggcagttatctgttaagcccaaaatggcaggcggtacgtgcggagtatcagcgtcagcgcgatccgctacatcagtttgccagccagcaaaccccggaagcgcagcttcaggcattgcaggataaaatccgcgctaatccacaaaacagcgaacagtgggcgttactgggcgagtactatctgtggcaaaacgattacagcaatagcttgctggcgtaccgtcaggcgttgcaactacgtggtgagaacgctgaactgtatgcggcgctggcgacggtgctttattaccaggccagccagcatatgaccgcccagactcgcgcaatgatcgacaaggccctcgcgctggacagtaatgaaatcaccgccctgatgctgctggcttccgatgcgtttatgcaggcgaactacgcgcaagccatcgaactatggcaaaaagtgatggatctcaacagtccgcgagttaaccgaacacagctggttgagagcattaatatggcgaaattgttgcagcggagattggattaatcatctggtgatgaagattatgtcattgagctgcataaaaaataatcgaatgaacatatgccaaaaataatcactaatcagtattattgcagattaaacaaataaaaatctttccataacaaatggttattcattaatcctgccataaactcgcgttattatgcattaatgcagcgaaaagctctgttgttaaagggttgcgcaacataccgcgcaaatgatactgatcataagcgttaaaaaaatctacaaaccaacgcaacacaattcatgccccggcagtatgtcacgttctcgcgtttctgaacggggaacggcgctccattgaggaagtcattcatatgaaaaatataaaattcagcctggcctggcagattctgtttgctatggtgctgggcattctcctgggaagctacctgcactaccatagcgacagccgcgactggctggtcgtcaatttgctctctccggcgggtgatatcttcatccatctgattaaaatgattgttgtgccgattgtgatctccacgctggtggtgggtatcgcgggtgttggtgatgccaaacagctcgggcgtattggcgcgaaaaccattatctacttcgaggtgatcaccaccgtcgccatcattttggggatcactctggcgaacgtcttccagcccggtgccggggtggatatgagccagttggcgaccgtcgatatcagcaaatatcagagcactacggaagcggtacaaagcagttcccacggcattatgggcacgattttgagcctggtgccgacgaacattgtggcgagcatggcgaaaggcgaaatgctgccgatcatctttttcagcgtgctgtttggtctggggctttcttccctgcccgcgacgcatcgtgaaccgctggtgaccgtgttccgctccatctctgaaaccatgtttaaagtgactcacatggtgatgcgttatgcaccggtgggtgtgtttgcgctgattgcggtgacggtggctaactttggtttcagctctctgtggccactggcgaaactggtgctgctggtgcatttcgccattctgttcttcgcgctggtagtgctgggaattgtggcgcgcctgtgcgggttaagcgtctggatcctgattcgtattctgaaagatgagctgattctggcgtactccactgccagctctgaaagcgtgctgccgcgaattattgagaagatggaagcctacggagcaccggtgagcatcaccagtttcgtggtgccgaccggttactcttttaaccttgatggtagcacgctgtatcaaagtattgccgctatcttcatcgcgcagttgtatggcattgacctgtccatctggcaggaaatcattctggtgctgacgctgatggtgaccagcaaagggattgctggcgtgcctggcgtgagctttgtggtgttgctggcaacgctgggtagcgtaggtattccgctggaaggtctggcgtttattgctggtgttgaccgtatcctcgacatggcgcgtactgcgctgaacgtggtgggtaatgcgctggcggtgctggtgattgccaagtgggaacacaaatttgaccgtaagaaagcgctggcttatgagcgtgaagtgctgggcaaatttgataaaactgcggatcaataattgaagattgccggggatatccacccggcaatgtgtgaatgcctgatgcgacgcttgccgcgtcttatcaggcctacgccagacagcgcaatagcctgatttagcgtgattttgtaggtcggataaggcgtttatgccgcatccgacatcaacgcctgatgcgacgcttaacgcgtcttatcaggcctacgccagacagcgcaatagcctgatttagcgtgattttgtaggtcggataaggcgtttacgccgcatccgacatcaacgcctgatgcgacgcttgccgcgtcttatcaggcctacgccagacagcgcaatagcctgatttagcgtgattttgtaggtcggataaggcgtttatgccgcatccgacatcaacgcctgatgcgacgcttaacgcgtcttatcaggcctacgccagacagcgcaatagcctgatttagcgtgattttgtaggtcggataaggcgtttacgccgcatccgacatcaatgcctgatgcgacgcttgccgcgtcttatcaggcctatcttaaccgttggttaatttttcaaactcttcacacccggtatcaaacccttccatacagctcaggttcaaccagtgcagcgccttttgcttgttcttctcgataaaaccttcttcaccgtttaagaacatcattcccgcccagtactcggaataaccggttcgggaaattgcagagctgcgtttgaaataccaggttgccttgtcatcgtcggccttaatgcccacgccgttggcgtaaatcaaaccaagcagcatttgggcatcgacggcagagtcgttctccagatcttcgctggcgttttctaacaggctaattgcctttggataatccggtttacccgcttgagtatttaccagaatatgcgccagcgttacttcaccttctttactgcccgcttgcgccgctttctctgcaagaacttttgcttgtggatagtccagactgaccggattggtgattttgatctgcgccagcagcgcgcaggcatcagcatcaccgctgtcggcggctttctgtgcccaatattcggctttgctcaaatcgccggagctaaaccagctgtcggcaagaaaatattgtgcgcgtcggtccccggcctctgctgcctttaaatactggctgccaggctcggagtcgttggcgtgggcaaagaatgtcaaaaacaacatcaatgcgataatttttttcattttgataatacgattgggtagggagtaaccagtataaagagttcgaatggataaaaaaacagcctccgaaaggaggctgtagaaaggacggtattacgccagtgccgcttcgcgcaggcgagttttcaacttgttgtactcgtcaatcacgtactgctcggcggcgcgctgatcggcgatcggctcgacgcgaacggcgcagtatttgtactccggcgttttcgtaatcgggcttaagttttcggtaaccagctcgttacaggcaccaatccaccactggtaggtcatgtaaatcgcccctttgttcggacgatcgctgacctgcgcacgggtgataattttgcctttacggctgtgcacccaaaccaatgcctcatcttcaatacccagacgtttggcgtcttcggtattgatttgtgcgtagccaggttcatcagccagcgccgccagtgccgcacagttaccggtcatgctacggcaagagtagtgaccaacttcacgcaccgtactcagtaccatcgggtactcgtcggtgagtttgtcgattggcgctacccagtcgcaggtgaagaactgcgccagaccgttcggggtatcaaacttctctttaaacagataagaagtcccctgatcggcatcactagtatcgcggcaaggccactgaatgaagcccagttcgcccattttctcgtaagtcgcaccgtagaaatccgggcacagatgacgcaactcatcccagatctcctgggtgttgttgtagtgcatcggataacccatacgggtggcgatttcactgatgatttgccagtccgttttcagatcccatttcggttcaaccgccttgaagaaacgctggaagccacggtcagccgcagtaaacacgccttcatgctcgccccagctcgtactcggtaaaataacatccgccgcgctcgcggttttggtcataaagatgtcctgaacgataaccagttccagatcttcaaaggctttacgtactgcgctcagctccgcgtcagtttgtagcggatcttcgcccataatgtacgcggcacgcacttcgccatgcgctgcgcggtgcggcagctcgctgatgcgatagccggtatgcgctggcaggctttccacgccccaggctttggcgaatttctcgcggttagccggatctttcacgtactggtatcccggatacgtatccggcagcgcgcccatatcgcaggcaccctgaacgttgttctgaccacgaaccgggttaacacccgcatgcggcttaccgaggttaccggtcagcatcgcgaggctggtcagagaacgcacggtttccacgccctggtagaactgggttacacccatgccccacaggatggcggcgcttttcgcctgggcatacatccgtgccgcctgacgaatctcactggcgctgacgccggtgatatcttcaacgctctccggcgtgtagccttcaacgattttacgatactcttcaaagccttctgtacgactagcgacgaacgctttgtcgtacagattttcttcaataatgacatggcccatcgcattcaacagcgcgatgttgctgccgtttttcagtgcaatgtgcatgtcagcaatgcgcgcggtttcaattttgcgcggatcgcagacgataattttcgccccgttacgtttagcgttaattacgtgattcgccacgattgggtgggaatccgccgggttgtacccgaaaacgaacactaaatcggtattatcaatttcgttaatagcattgctcattgcgccattaccgacgctttggtgcagacctgcaacgcttgggccgtgtcagacacgagcgcagcagtcaacgttattggtaccaataacggcgcgcgcaaatttttgcattacatagttggtttcgttacccgtaccacggctggagccggtcgtctggatggcatccggaccgtacttctctttgatggcgctcaggcgctcggcaacgtaattcagtgcctcatcccaggaaacaggttcgagtttgccgccacgctggcgacggatcatgggggttttcaggcgcggggtcaggatctgggtatcgttaatgaagtcccagccataataacccttcagacacagggtaccctggttggttttcccctgcgctgcctccgcccggacgattttgccgttatcgacgaccaggttgattttgcaaccacttgcgcaataggggcaaaccgtgacgacttttttcatcggtctcgctccagttaatcaaatcacgcatacgcgctctcgactacagtatgcatcttttatgccacattttatgtggggtcattccctgatattacgggcactatttattcaaaactctgacgaaaaacaggctgtcgtcagttttgacgtgacgaaacgaaataccgcgtgacagccatcacgcggcagacattttattttttctcgacgacgggacctgcctgatacccgccgcccaggcttttcatcaactgaatgctttggatcacccggcggctgtccagcatcagtaaactcatctcttcggcaagcactggcaaccgggcttcggtggcctgtaagcggctggttaagccgcgctgataggcggcctcggcagcgcgctgggtaaagcgcgtggcttccacgcgttcagcctgcatttctcgctcgtcgttgagcgtttgcagacgcgtgccgttgacggcaacgtcacgcaccgcgttcagtacactctggttgtaacgttcaatcatcatgttgctggcggcgcgcgtgccttcgagattggcattcaaccgtccaccgtcaaacagcggcaatttcagacccgggatgaagttgaactggcgactggtttttttgaataaggtatgcagatggatggagtccagaccgaaaaacgctttgatatcaaagctcggatagaacaacgcccgcgcggaatccacctgatctaaactcgcctgaacataccagcgcatggcttgcagatccgggcgtctggcgagcaactcataagagagtgtcgccggaatgccggtctggacttgcggtaatgccaccggtctgatctccggcatatcgctggctcccgcgccaatcaatgcacgcagagattctcgcgtttcggtgatttgccctttgacggcaacaatttgtttatcgaccgccagaatctgtgcccgcgcgccgtggaaaggcacttgcgcttccagaccgtgcgccactttactctggtgcgctttcaccgcgtaatcaatcacatcgtgagtttgttctaacagatcgagcatctgatagctggcctgcatactgtaataaagctgcgctacgcccgtggccaggcttagctctactgctgcggtttctgccagcgcggcattatgcgcgccaatggcggcggcaaccgcactgcgatgcacaccccacaaatcaagatccagtccggcaaacaaacctactgtggcttccgtatagtacggcccgtccatacccagtgctggcgcatccatactataagggcttaaaaagccgttcgcgctgacacgttggcggttgagcatccctaacgctgcgacctgtaattgactaccggcatctaacaaatcggcctgggactgcgctttttcttcccgcagtttcgcttcggcgagggtgtgactaccacttagcgtccgttggatcagcgcatccagctgcgggtcattgagttgtttccaccactgcgcctgcggccagccggagctggcaagatgaatatcgtcggccagtttgatttgttccggtttgagctgttgatgaggtgcagaatccttacgtaccagggcacagccggaaatcagcgtcgtgctgccgagaatgctgcacaacagcagacgactaagttgacgattgatcattgcgtggctccttgtgcctgttccgtggcgggcgttaatgccggggctgtccagtctggcaagcgggcgaaaagctggcagacgtgttgctcctgttttaataaggtgggcaggatggcctgagaggcgggtgtctcttcaagcgttatttgaggagaacggctgagtgcggttgccagaccggcagcgtatttctccagggcgtcggcaaactgacctgctctgtccggctgtagtgcgttatccagcgcctgcgcgctgttccaggtggcatcccaggcgtgaagaagatcgcggccctgacgaataaccgtttggctacgttcaatcagtaatgcgcgttcttcgctgtccagttgacgctccagcgccacgcgttggcacatctcttcacaggcattaaacgccgcatgcagaccgatacgaatttgcagataagtgcgcagagccgtgacttcctgctggcgtgggatccgcattactttacttaacatacccagcgtgccagccagtttttgcggcagtgtgcgcgcttcactttcaggccagacaaaggtgtaaatcaccgcggacaccacggtaccaatgatgatacccagggcgcgatcgcgaatttccaccaggtcgtacactgggccaaaaacgttttcgagcgtggcgagcgcgaaggtgaccaccatctgtgtgccgatataagaagagcgttcagagctggtggcaatccatgcgcccaacaggaaaatcggtgccagcacaaacagcaattcgacaatattgtccagccagggcatgaccagtagcgtgaataacagcgccagaatcgcgccgcaaaaggccccgccaaaacgcagcaccatcttctggtagctgctaccgacatttgggttagcgacgatcacgcatgtcagcatacaggtgtgaatgccttcccagtccacgccgctgtaaaaggtgtaacagatcaaacaggcgagcagcgtttttaccgcgtagcgcatatagtctggattggtaaaagcatcggcggccatacttggcggtttggctgcgggcgttggcggcgtattcgggtccatctgacccagttgtaacaacgtctggcagatattctccaggttacattcccgtgccgccatcgcttcactttcactgatccgccagtcgctttgccagcactgaccttcagcaacggcatgctgcagcttgttgatttcactagctaatttttgtcggaattcaataattgcctgagaatcagcaaaagaggtgggatcgtagcgattcagcgtgctgtaaatgtaggttaccgttgccacgcagctttgccaccatgcgttttgagttcgccagttggcatcgtccgcgaggcaaaagacattgagtttttgtagcgccagcgcctctctttcaatccgcgtttcgggtagcggtgcgaggctgtctgtcaggtgactaatggcatcatcaagccgatcattaagcgcctgatgcatttggctaatggcacgactgggaaaccacagcacgccgattaacgtcatcagcaaggttggatagaggccaacaacgatacaccacagcgttaagcgcacgaccacttccggatagtcgagcatggcggggaaggtttgcccgtaaatagcgacaatggcgacggcgaaaaagaccagccccaagcgatgggtgcgcatcaaaaacatgcagcccatcaggatcggtccggcgatgatcaatcggatcaacggttcgccgtaactccatttgtagatcaaaaacaggctgccgatctccagcaccgtggcaaccacaaacaagatcgcgacaaatttggtgtaaaacgcgttgctctgaataccgtaaaacagcactgccaggcttaacgccacaaaagggatctcaaaggtcatgctgatcagaatcaccagcaggcagcctacccagagttgcacggtctgcggcacgcgacctggtcgccgctcgcttaactcttcatgaaagaacgccagcagcctgaccaccggtaatggcagggagttgagcgcgctcattattgcggctcaagattagcgactgcgctagcgccgatgcggaacatttccgggtcaggtttatcgaccatgattttgaccggaaaacgctgggcaacgcggacccagttaatagaacgagacactttcggcaggccgcccagcaccaggccgccgtcatccggtagcacgccgtagccaatgctatccactttaccctcgaaggttttgccgctgtcactcatcaggcgaatcgttgcgggtgtaccactgcgaatatttttcagatcggtttcgcggaagttggcgatcacataccagtgacgagtgtcgattagggtaaaaatagggcgcatggcagaagcaaattgcccgacggaggttttgagggaaatgacccggccatcaaacggcgcgcgaacggtcgccatttccagatgcagtttggtcagggcaatatccgcttcgaccgccgcacgctgggcaactaatgcatccacgccgctgacggcgctggcggcactctgcgcctgtaacaatacggcattaagatccgcttctgcggcgcgctgcgccgttcttgcacggtcaacatcttccgcactgacaaaaccttctttcagtaatggctcggtgcggcgtaatgtatctgtggcctgtttcgcggcggcacgggctttttctaccgtggcattaacgctgtcggcaccaaactgttgcgcgtcaacgctacgctgggtgagcataatttgcttatccagcgccgcgagggaggcttcagctttcgccagattggcttcgtacgggcgcgggtcgatgcggaacagcaaatcgccctgtttgactgcctggttgtcggtgaccgccagttctacaatgcggccgctgacttccggtaccacatcaatggtatctgcactcgcgtaagcgtcattagtacttggcgcactgtctacgcgccagataacgaaaacaagggcaaccagcgccaacgcaaccactaacagagcagggaatttactgcgaggagcttttttcggcgtactttccatgagcgcgtctcaaatagattagaaaaatgccagccagaacagcatggcgtagagagcaaaaagggcggtataaataattccgacaaatgccagattgatatttgcccgctgaataactcgcctcgtgatgagcgtcaaaataaggctggcaatggcgcagaaaaaccagctgggataataagcgccgatcaccgggattgccggagataatgagcatcccgaaaccatgaagacgggaattatccaggctgtttttttgagttgcatcgccatgcgagagagaactgttggcatattaaatacatcctgtctgctgcgaacaatatctgtagtgaatatcaatatccattgaaggcgtcagtatggctattttcttgatgaataaaaatagctttattcagccaccgcattcataacttatatattttatttattaattggctgtatatatttttaaaataaatacttttgggggcttcagcgcccccaaaagcgagtgacattaatttggggttacgatattcacccacaaatcgaaattatccagacaggcgataatttcttccagtttcgcgccattgccaataattttggctttcttcgcttttaccagatccgccattttggcttgtccggtcagcacggcgtgcagatcttcacggctgatgtagaaagaggcgtcggcttgcggttgcagcgttttccggtagttaagcacgctatcgttcagcgtcaggttgaggttatcgccgttgctcatattgaagttcaggctgatatttttacccgcagctttcgcgctatcgaggcgaacggccataaagtcgaacagcatttcgacgctcatcccgcgaatggtgtccggggaaccggtggtgccgtggctgaacttatgcaccccttcgcgcagctctttcgcgccggtcaggtagaaaccgcgccatgtggcggactcggcctgatagcccagctgttcaaagttattcgcttgcagattcttcgcgacctggtcacccgggttggcggcaatcacctgtttcagcagttctgcgctccagcggtaatcaccttgcttgttcgcttcttgcgccaggttgatgacacgggcagaaccgcccagcgcctgcacgtaacgtttacccatctccacctgaccatacggatgcaggttagccgggttaccgtcgtaatagccaagatagaagttatacaccgcgcgggcgttgtggctgacagaaccgtaatagccgcggctggcccagttattggcaagtgcaggcggcagcttaatcatgtcgccgatttcattcatggtgtagccctggttcgccaggtgcagggtctggtcgtgaatgtacttgatggtatcgcggtatttaccaatataatcattgatatgcttattgccccagaccggccaggtgtgcggcataaacagcacttccgcgtcgttaccccacatatccagcgtttcgttcagatactcggtccacttgctggtgtcgcgggttttcgcgccgcgcagagtgtagaagttgtgcagggtatgcgtggcgttctcggcggtacacagggctttcagggccggaatatagaagtgcatttcggctggcgcttcgctacctggggtcatcaggaagtcaaactccaggccgtcgataatcatcttctcgccagttctgacgatagttttcgtcggtgcaataatgctcgggtcgcccgttgccagcgtcacgccaaggccattacccacattgccttgcgcgttgtgcggcagtaacagaccgtaagagtagagcgcacggcggctcatgatgttacccgccagcacgttttcgctgatggcttcgtccataaagcctgcaggggcaatcacctgaactttgccggatttaacatcggcttcagagataatgcctttcacgccaccatagtggtcggtgtggctgtgagtgtagataacggcaacaatcggtttttgcggacgatgctggaagtaaaggtcaagtgcggcttttgcggcaggcggcgtcaccagcgggtcgataacaataatgcctttctcgccctcaacgaacgtaatgttagagatatcctggccgcgcacctgatacattttatcggtgactttgaacaggccagaaataccgttgatttggctctgacgccacaggctggggtttacggtttccggcgctgcggcattaatatcaaatttgtaatcgtccgcgcggtagtaaactttaccgttcgcatcacgcagaataccttcatccagcagcggggcgataaatccacgctgggcatcgtcaaaatcctgacgatcgctaaacggtaaacttttggcgtaattctgattaacctgttgggtatattgagtggcggctttcgcttcctctttcgcgttagcggtatttaccatcatgccgctggcggcagttaacgcaataacaatcctgctcaaacggaataaccgagagttattcatataaatctccatttatcatttatgtcgtaaatatgtaatccatgcaaaatacgtcatttaaagctggcgttatcataattgggaaattgcgactttaataagtggaagtgtgagcggaacgcgccattttattaggcatttgtgctgaagagggaaaattacagtaaaactatcattgcagaaaataatatgagtcgttttatgtgtttattatatatattgtacctgtcgttggcacagcgggacattgcgctactgtgccaacgttttactcatggggctttagcacagaactgtggcaaaaaacgttgatgcgccaatattgctgcaccctgagcgccattaaagtcagaagaactggcggcaataaagcgcacgacctgatgcggcagtggacggcgcaggtacttttgggtcatggcaacgagagtctcgcgtgggaaggcgggcatatccatcacgccaccgcccaggatcaccgcatcgggatcgaacagattaatgctggtggcaatggcccgtgccgcgttttcaagcagactctggacgaaaggggcgttttccgcatggacgaaaagatcgcgcaatgggtaatttcggggctgttgttcgtaccagcgtcttagcgccattccagagcaattggtttccaggcacccaggattgccacacgcgcagtgttgggtcatatctcccagggggatatgacccagttcgcctgccacaccgtgtgcacccgtccacggcgcaccgttcatccacactgcgaaccccatccccgtaccgagataggccgccagaaccagttgttgcgtaaggcggttttctactacgtcccaggagagttgcaggttaacgtcgcgggaaaactcaaccggacaattcagcgtattttcgagcttatcggcgagatcatataaatccgccgctgttaacggcaggttaggcgtagaaataatggtgcgtttatctttactgaccagcgccggaaatcccatcaccagaccatgacagcgagcgttaaagcgcctgagttgctcgtcaatcatttcgccgataccgctcaccaggccgggagcaatgacttctgcggtccgctttttttcgcagtgtagcgtttcaccttctgctgtccgcagacaaaagcggatatgcgttgcccccatatccacgcccgctacgacgttatgctgtttttgcatgaggctgtacctcgctttttgcagccagaatctgcgcggtcataattctccatgcttcgtcgatattttccgcatgattaaacaggccggaagtgccgacgataaagacatccgcccctgccgccatcagtttttcgtaagttgcctggttgcaggaaccgtccacctcaatttcgtactccagaccttctcgttcacgccatgccttcagttcggcaagtttatccagcatttcaggaatgaacggttgtccggcaaagccgggatcgacagtcatgaccgtaattttatcggccttatggatatagtatttcatggcctcaactggcgtctccgggttaaggatcagccccactttcatgtcatgacggcggatttcatcaatcaggcggaacgcctggccgttgatggtttccggatgcagagtgatgaaatctgctcccgcacgcgccagttgagcaatgtaatcctgcggccgcgtcaccatcagatgacagtcgagcggtttagttgccagttttttaacctgacttacgaagaacggactgagtgtcagattggggacaaagtgaccgtccatgatatcgatgtggaagtaatcggcatggctgtcgataaattcgatctgttctttaaatttcagcagatccatacacattaagctgggggagattttcatgttcaattccttacttactgataagacggtcaagggcgacagccgcgataattaatccgcccatcaccaccagttggtaataggtttgtacctgcaaaatattcagaccgttgttgatggtgccgatgatcaacccgccaatcaccacagagaaaatgcgccccttgccgccgaagaaactggtgccgccaatgatggcgctggcaatggcataggtttcaaaacccataccggcaagcggttctgcggcaccgagtcgtgcagtactgacgacgcctgccagacctgcacaaacaccggagatgataaacaccaccaggatgtggaatttcacgtcaatcccggaatagaacgcgctatttttgttgccgcccagtgcgtagatgttgcgcccgagccgcatacgcgttgtcagaaaccaaaggatgagcgcgacaattagactgaagataacggggacaggtatcccaattacgctggcggcaaagaagttcacgaagtcaaaactgaagccgtatacgctgttggcatcggagatcaccagcgtgatcccacggaaaatcgcgttggtgccaagggtgatgatgaacgggtgtagccccgtccagttgaccaggcagccgttgatcgcccccagtgcgccgccaaccagtacaccgccaatcatcgctgcgagaaacgggtcaacacctgccaacatcagtttggcggtcaccataccggaaagcgccagaatcgcgccaacgctgaggtcgataccagcgaccaggatagcgaaaaactcgcccatgccgatcaataccgtcacggagctttgaacaaaaatctgggtaatattattggtggtcagaaaatattctggactcaggctaccaaagatggcgacgatgatcgccaggataaaaaaggtgccgtatttatcccagaacagcgcaaagttgaacggtttcttctcgctcgcttcgctttttactcttgtggtaaagcccatgccataatctcctcttcgctcatgtcatcgcgattcgtcaggatttgcgtcagtcgtccttcgcagaacacggcgatgcggtcgcagacggtgataatttcaggtagttcagaactcaccatcaggatgacttttccgtcgtccgccagttggcgcatcactttgtaaatttcggctttcgcgccaacgtcgatgccgcgggtaggttcatcgaaaataatcacttccgggcaacagcacagccatttggagatcaggactttctgctgatttcccccggagagttcggtgatattctggtttacgctatgacatttcagcgccagcagttcgcgttgattttcagcggtacgttgctcgtcaacttcatgaaacaagcccatcgcgcctttatagccgccgtctttcagactgcggctgatcgccatgttctgagcgatggaaaagttggggaaaaaaccgttatcccggcggctttcagtgatgtaagccatcccttttttcacggcatccaggggactacgtggagagatatctttgccattaagacggatttctccgccagcgcgtttatccacgccaaacagacaattcatcagttcagtacgtccggaaccgaccagtccggcaaagcctaatatttctccccggcagacgctaaaactgatatcccggaccttttttctgtcacgactggtgacgttccgcacctcaaaaaccgtttcgtgcgcaaggttgctgacattctccttcatcgcgttaaaacggttttgcagttcgcggcctaccatcagacggacgatatcgtcattactcacatcgcttactatgccgctgcaaacgctgctgccgtctttcatcaccgtatagcggtcgcaaatacggcgaatttccgccaacttatggctgatatagacgatggccgtaccctctttacgcaactgattcatgatcagaaacagatagtccacctctttattggtgagactggaggtgggttcatccatgatgatgactttggcatcgagcatcagcgttttggcaatttctagcatctgcttgtggctgatagataaattcgccactttctcatctagatcaactttcaagcccacgcgtaataacatcatggcggcgcggacacgcatttctcgccagtcgataatattgacgccacagatttttttcgtcagatgacgaccaatatataaattttccagtacggttaattcatcaataacgctgagttcctgataaataatcccgataccgagttgtgccgctaatttatgatccagcttgttatagctaatgttattaatggtaatggtgcctttggtcggctcatgtattccggataaaactttcattagcgtggatttacccgcgccattttctcctagtaatgcatgtatttcaccaggataaaccgttaaattaacgctctttaatgcgtgaaccggaccaaaggacttgccgatccccgccatgcttatatatggcgtggccataaataacctctctgcacgaaatatcgtattattgcctgatggctacatttatcaggtctacgttcaggttattttgttggccggataagacacttcattagcatcatcatccggcatcattcagttttattgagtgaccaggatactatcgaccagtttaaattccggtgctttatccagcgggataaccttgccggatttctcagcgtcaaccatcagcttcagacccgttgcgccgatatccgccgggttctgggcaaccgtcgcggtcatttgtccggcttccaccattttgcgggcttccggaatgccatctgtaccgacgaccagcacttttcccgtttttccggcgtttgcgactgcctgagcaacacccattgccatcgtgtcattcgcgcaatagatcgctttaatattcggattacgttgcaacacgttagtggcgacatccagtgctttaatgcggtcccagtcggcaggctggctggcgacaagcttgatctggcttgcttttttgaaggcttcggtggcaccattacgacgcgcttcaccggaggcgttaccggctttaccctcaatgattgcgacttcaccaccttcagcgcccaatttgtcaataatgaagctcgcgcctttcgccccgacagcaacgttatcggtggtgacaaaagcttccacattgccgccagcttttttcagattatccatgtcgattttttcatcgagattaaccagataaatgccttttttccatgcgcgggcgacaggcatgaccagattcacactggataatggagcgaaggcgatacctttgtaatttttattactgagatcttcaaataactgcaattgagattgaaaatcgccttcactaggagaggcaaaaatatcaacgctgacgcccagtgtttttgcttcatcttcaatgccttttttcatatctacccaaaatgggttggagagggttttcaatacgacagcatattcggcggcagcaaaagcgctggtactcaacattaagcccacgagtgtgccgctgaaatatttcagatatttattcataataatgttctcacggtaaggggacaggtaactccgcgatggcggaattacctttttcttatttcagcgcgcctggactgaagaaatcaacaattgcgccggttttttgcatattaatattagcttgttcaatgttgagctgggcgacagagacaaaaaaagcgtccagcaaagttagttgtaatattcttgcgctggcattacgacctaataacggcgtttccggggctggactgcaaataatataatcggccagtttcgctatcggactatggtagctatgggttatacaaataatctttgccccgttcttttttgccagttctacggccgcttttacatcactggttcgcccggaatgggtcactaccagcacaacatctccttcctgtaacaagctagcggacatcatcatgatgtgagcatcaggataggcctgacagcgtacgccaatgcgcaagaacttgtgctgtacatcagcacagatagcattacttcctccggcaccgtacaaatcccgctgtctggcctgatagaaaaagcgggcggcacggtggatctcatcaacgttgacgatgctctgaccttccataatggtgcgtaaagtgatgttaaataccttattcaccacatcctgcggcgcttcatcaaaagccaactcggaaggcaatacctgttcactctgagaaaaataatcttccagcgcactgcgtaagttacgaaagccgctaaaccccagcagcttacttaccttaactatcatcgcttcagataccgccagagcttctgcgacatctttaattgcgggtgcacaactcaggttaccgggtttgagtaaccactccacgatgcggctttcattttctgtcattccttcctgcttcattcgcaggtaaggcgctaaccctataccgttcggaagcgcactatcaaactcactctggctcatcacgttctcttgtccttgaattgaagacgccactatatcaccacagcaagaacagaaaagatgctggcgacttcacaaaaaaataaaatttataaagtttattttattgtgaacaatggcgagtggcttaaaattttatttcatttaattagtttaaaaacatgatgttatttgtttttctggttttttagatgatagatgttgctggatggtgagtgtctttaacgctattgcgctgtcagatgtaactctgtaaaacagatcaggaaggcgtaattcatcgattttgggtgtttttaattcattaacatcacaaatgttttttgattgtgaagttttgcacggacggggaagatgaatgaaaaagattgcatttggctgtgatcatgtcggtttcattttaaaacatgaaatagtggcacatttagttgagcgtggcgttgaagtgattgataaaggaacctggagcagtgagcgtactgattatccacattacgccagtcaagtcgcactggctgttgctggcggagaggttgatggcgggattttgatttgtggtactggcgtcggtattagcatagcggcgaacaagtttgccggaattcgcgcggtcgtctgtagcgaaccttattccgcgcaacttagccggcagcataacgacaccaacgtgctggcttttggtagtcgagtggttggcctcgaactggcaaaaatgattgtggatgcgtggctgggcgcacagtacgaaggcggtcgtcatcaacaacgcgtggaggcgattacggcaatagagcagcggagaaattgagattcatccactacttgcatggatgagtaatgattaatgtggatagagtttctttttgaggttggctaatgaaacgctttccgctatttcttttattcaccctgctcacgctgtccaccgttccggcccaggccgatattatcgacgacaccattggcaatattcagcaggcgattaatgacgcttataaccctgaccgtgggcgagactatgaagatagccgcgacgacggctggcagcgtgaagtgagcgacgatcggcgcagacaatatgacgaccgccgccgccagtttgaagatcgccgcaggcagctggacgatcgccagcgccagcttgatcaggagcgtcggcaactggaggatgaagagcggagaatggaagatgagtatgggcgatgaggttgggtatggagcaggcatcgcccctcaccccaatggggagagggagaaaacgagcgcaatattcaatatcgagcacaatcggtcccctcgcccctctggggagagggttagggtgagggggccagcgcgcacattccctctcatcacgccaccccaatctccatcccatcaaaccccacctcaaacccactcggtagtgcgttttccatcagccacgcatcaaactggtggctgatatgggtcagaatcacccgtgggctgcggataacctgattcagcgcaagcacggtatttaaatcacagtgattacgcggtgcatccgcgcgcggcgggtgactgcaatccatcaccattacctgcggctgattattgcgtaaaaatttcagcgttttttccggcaagcctgcggtgtcagacagccacgccacccggctgtgtgccgtttccagcagataaccgaaggtcagtttactgtggttgagcggcaggggcgtgacctgtaacccctgcaaatcaaacaccacaaacggttccaccgtgtggctgaaatcaagcaggcccggatgtttaaacagatcgtcgcagccctgttcatccggcgggccgtaaaccgggatcggatcgccaacgccccagcgcagcggaaacagcccctggacgtgatccatatgataatgcgtcagcaaaaactgctggaagcttccggggctccagcgatcggcgagatcgtgcagcccggcgtcgatcagggtgattgcgtcgttaaacttcactacgccgctgcacggttggcggcgatactgcgggctgcgccgcgctctggcgcaggccgcacactcgcagccccatgccggaacgccctgtgcgccgccggtgccggtgagcgtgagggtcaggctcatgttacagcgccttggtgaagcggaagtggctctgctcgtagccttcgcgcagatagaaacggtgcgcgtcgtggcgcttcacgttggtgctaagttcggtcatttcggccccggcctggcgggcttcttcttctgcccacgccagtaacttactgccgacgttcagaccgcgcgcctgcggcattaccaccaactcctgaatttcgccgatccagttgacatgatgcagatgaaactgcaaatgcaggccgatcatgccgacaacttcgccatcaagcagcgccagatggtagcgcatgtttgggtcgcgcagattggcgttaaaacccacgcgaaacgcgtggtggtcaaactccgcctgttttagctcacaaatcagcgcgtaaaccgcgtcggtgtcgtactgcgtggccgggcgaagctcacaagcaggcatggtgtttctccttctgatggatcagcgtcagcagcgtgtcgacgctctggcgcaggctgccgtcattgttgagcgtatggcaatcctgtggagtatagcgggcggcgcgcgccaggcgggcgttaatttcactggcgttttcacggccacggttttccaggcgctggcggaggatctccgggctaacctgtaaacagacgggcagcagcgcgctttgatagcgcgcccgcgcctgcggcagatgggcgcgactgccgttgaccagcacgtcgaatccggcgtgcagccagagatcaatctcgacgccgacgccataatacagaccgttagcgtgccagcttaaggccaacagattttgccccgcgcgggtaaaaaactcctgctcgctcagggcgatatggttttcacttccggcgctggcatcgcgcgtgatgtagcgatgcgccaccagtaactgagtttgttcccgcaggcggagttccgccagcaggctgtctttcccggagccggacggccccattaaccaaatcagttttcccatcatcagaacacccttttaccctgacgccagacgtggtcgatatgaatatgattgtccttgcgatgcgccagcaccaggtcggcgcgtttgccctcgccaatcaccccgcgatcctggagattaagcgcctgcgctggatttttagtcaccagcttcaccgcctgcggcagcgtaaagcggttgctctggtcatcggcgacgcgaaatgccgcatcgagcaggctggcggggtagtagtcggaagagaggatatccagcaggccaagctgcgccagttcactggccgccacgttgccggagtggctgccgccgcgcacaatattcggcgcgcccatcagcacgttcatgccatgcttgcggctggcttccgccgcttcgaacgtggtgggaaattcggcgatcacgctgccaagctggtgagattcagcaacgtgggcgtgggtggcgtcatcgtggctggcaagcgcaatttttcgcgcgcggcacagggcggcgatggattcgcgattcggctggctccagcgtgcggcgagcgccagttgctcttcttcgtactgctgcatctgcgcatcagtgagggagtatttgccctgataatattcgcgatacttctcgcggttggcgaactggcgctggcccgggctgtggtccatcaggctcaccagcgtcaccggctcgcgctgcaccagtttttcaaacagcggcagcgtggtgtgatgcggcagttcgcagcgcagatgcagacggtgctcggcgcggttgacgccgcgtttctgcgtctcttcgatggcgttgatcatcttctccagattctccagccgatcgccgccgtcgcgcacgtcgccaattgccacggcatccagtacggtggtgatgccgctcgccaccatcagcgcgtcgtggctgctcatcgcgctgtgggcaggccagtcaactttcgggcgcggggtgaagaatttatccagattatcggtatgcagctcaatcagccccggcagcagccagccgccttcgccgtccatcgcctccggcaggcggctctggctttcggcaaaggcgcggatttcgccgttctgcacctccaggctaccgcttaccacctcgttttccagcaccagcttaacgttattgataatcatgaagaggctcccattgggtgttagctcaactagaggctcccattgggtgcaggcggtcggcgacgtcattacgtacagcttcgtcatggaagatgcctacgatggctgcgccacgggttttggcttcgcgaatcagttccaccaccgcggcgctgtttttggcgtccaggctggcggtaggttcgtcaagcagcagaatggggtagtcgacgataaagccgcgggcgatgttgacgcgctgctgttcgccaccggaaaatgtgcttggtgccaggtgccacaggcgttccggcacgttcaggcgggtgagaagacgcgcggctttagcggcgcaggcttcacgcggaacgccggtatcgagcagcggctgcatcaccacttccagtgcactgatacgcgggatgacgcgcagaaactggctcacccagccgacggtggttttgcggatttccaccactttgcgcgctggcgcggtgaccaggtctacccactcgtcaccgtgtttgatctggatttgaccttcgtcgggcagatagttggcgtacaggctgcgtagcagagtacttttgccgctgccggaatggccgtggagcaccacgcattcgcccgcgttgacggtgaggctggcgcgattgaggacgggcaggcgcacgccgttttgctggtgcaggatgaaggttttactgacgttttgtacgttaatcatttttcgcctcgtggttcgggtgtcggatgcgacgctgacgcgtcttatccgacctacggggagcgcatttgtaggccggataaggcgtttacgccgcatccggcaccggctcaattctgcaaaacgctactcaccagcagctgtgtatacggatgatgcgggtcgtcgagcacgcggtcggttaacccactctccaccacttgcccctgcttcatcaccagcaaacggtccgccagcaggcgggcgacgcctaaatcatgggtgacaatcaccaccgcgaggttcagctccaccaccaggccgcgcagcaggtcgagcaggcgggcctgcacgctcacatccagcccgccggtcggttcatccataaacaccagcttcggatgcgtcaccaggttgcgggcaatctgcaaacgctgctgcataccgccggaaaaggtggtcggcaggtcgtcgatccggttggcgggaatctccacctcttccagccacttctgcgcggtggcacgaatatcgccgtaatgacgtgccccggtcgccatcagccgctcgccgatattgccgcctgcgctcacctggcggcgcaggccgtcgagtggatgctgatgcaccacgccccattcggtacgcagcaggcgacggcggtcggcctcgctcattgcatacaggctacggttctcgtagtgaatttccccctgctgcggcgtcaggcgcgcggagatgctcttcagcagcgtggtcttcccggagccggattccccgacaatgcccagcacttcccccggccataaatcaaaagagacatcgctaaagcctttgcccggcgcgtaaaggtgggtcaggttattgacgctaagtaacggttgattcattggttttttgcctcgctctgttggcggcaataatcggtatcggagcagacaaacatgcggtttccggcgtcatccagcaccacttcatcaagatagctgtgggtgcttccgcagatggcgcatggctcatcccactgctgaacggtgaacgggtgatcgtcgaaatcgagactttccacgcgggtaaacggcggcaccgcatagatgcgcttctcgcgccccgcgccgaacagttgcagggcgggcatcatgtccatttttgggttatcgaatttcgggatcgggctcgggtccatcacgtagcgcccatttaccttcaccggataggcgtaggtggtggcgatatgaccgaagcgggcgatatcttcatacagtttcacctgcatcacgccgtactcttccagcgcgtgcatggtgcgggtttccgtttcgcgcggctcgataaagcgcagcggctcggggattggcacctggaagataattatctgatcttcggtcagcggcgtttcggggatgcggtgacgcgtctggataaccgtcgcatcgtccgtacgttccgtggtgtttaccccggtcacgcgcttgaagaagttgcgaatgctcacggcgttggtggtgtcatccgcgccctggtcaatcaccttcagcacgtcgctttcgccaatcacgctggcggtaagctgaatgccgccggttccccagccgtacggcatcggcatctcgcgcccgccaaacggcacctgataaccggggatcgccaccgcttttaagatggcgcggcggatcatgcgtttggtctgctcgtcgaggtaggcaaagttgtagccgctcagattagccatggttctgctcctgttgcagacgtttgagtagctccagttcggcctggaaatcgacgtagtgggggagtttgaggtgactgacaaagcctgcggcttcgacgttgtcggcatgtgccagcacgaactcttcatcctgcgccgggcctgtcgcgtgctcgccgtactccggggcttgcagagcgcggtcgaccagcgccatcgccatcgctttgcgctcgctcatgccgaacaccagcccgtagccgcgcgtgaagtgcggcggctcacccggcgggtcgataaaaccgttaaccatttcacactcagtcatcagcagttcgccgacgttcaccgcaaatcccagctcttccggcacaatgctcacgtcgatatagccgctgcggatctcgcctgcgaacgggtgattgcgcccgtaaccgcgttgggtggagtaggccagcgccagcaaatagccttcgtcgccgcgcatcaactgctgcaaacgggaggagcgactgcaggggtaaaccggcggcgtgcgggtgatgtcatccggctgtgcgccgctatcctcttcaaacttcgccagcccctgacgcgccagcaggctgaaaacgtgcgggctcggctgctgttcgctgtcggcggtggtcagcgtcggcgcttcgccgtttgccagcagggtaaaatcgagcaggcgatgggtgtagtcgtaggttgggccaagcagctggccgccgggaatgtctttataaacggcggagatacggcgttcgagacgcatcccggtggtgtcgagcggctcgcttaccgccagcttcgccaacgtggtgcggtaggcgcgcagcaggaaaatcgcttcaacgttatcgccgctggcctgtttcagcgccagcgccgccagttcgcggtcggcaatgccgccttcggtcatcacgcgatctaccgcgaggttaagctgctgttcaatctgggcgacgctcagttcgggcaaatcggtatcgcctcggcgtcggctctcttgcagggcgtgggcggcgtcgatcgccttctcgccccctttcacggcaacgtacatcagcacacctccacatgagtggttcgcggaatagccagcaggcgctcgccacaggtcaggatcaggtcgatgccgagcgggaacggatgcgggcgctcggtgagttcgtgcagaatgcactccggcagctgcggagcgatcattcgttcttcggcaatacccgcaccagtaaggcgcaacatgcgtccgccgctcaggctggcgacctgtaaaatcagcgtcgcacccgcttccggcgcaacggcggtgccggtggaaagggcgttgagctgttcgctggaaatcgcctcatccgtcaccgcgaaggtcgcctgttccggctggctgaccagcggcgcgttggtatgaaaacgcaggctctggttgacgatatcgttatttaatggggtagaaagccacaccggcgtgtcgttatcggccagcgtcagcagcacgctggtggtggcgatattcagcggttgccagccgcgtttgagctgatgcagggcgacaatcacgcccggctcgctcatggcctttaacaggcgacgaaaactgtgctgggcatcctgcacgggaagcataaaagcggtttccagggtcatgcgttgtctccgcgaaccatcgtaaagaagtcgacccggctggcgttcacttcggcctggcgtgcggcaatgcgtgccatacggtcagcgtccagcggggcaataagggtttcacttaagttttgaaagtggcgagattgctgcatcagcgcgtcaatcagcgcgcagcgttcggcgtgctgtttatcacgcccctgcacccagctgtagccgagcgtgccgtcagtcaggcgcacggcggcgcgggtcagcgtggcgtcgccggcaaaaaaacgttcgccggtgccgcccatccgcgcctgaatctgtaccaggccagtttcagcggcgcggatcacctcatagtcggcggtgatgtttagcgcgttcaggcgtgctgccagttcagccggttggctgtgcgccagcacggacatccagtgctggcgggtcgcggtatctgcgtgcattcagtgctccatagtgaattcaatcatgtcggcgcgcgtcaggctgacggagtactccgccgggctgctttcaccgtcacggtggttaagggtgcgcacgcacagcagcgggctcatattcgggatttcaagacgctggcactctttggcctgggcgcggcgggcgctgatccgcgtctggctgcggcgcagcgcaattccggtttgctcgcgcagaaaatcgtgcaggctgccgctgtcgaagcgttgcagcgtcggccagagggtgaggtccgcgaagtagtggtcgattaaacagagcgcgacgccgttgacacgacgcagggtgcgcaggtggatgacgttctccccctcggtaatccccagtgcgtcagcgacgtggccggacgcggggcgcaatacgctaagcagtttttcgctggtgggatggctgccctgatccagcagattctggctaaaacgcgcctgggcgttgagcgggtaatcgaacgggcgcatcagcaccagcacgccgacgccctgacggcgctgtacccagcctttttccaccagttggtcgatggcgcggcgcagggtgtggcgattcacctcaaagcgcgctgccagttgctgctcggcgggaagatagtcgccgcagcggtagtgttgacgaagctcctgctcaagttttgcggctatctcttgatagcgtgttgggtagctggtcggatgtgtagacaagtgcatagatatcaatgcctcgcttatcagataaagtgcttacgcaaccgttgagagaggaaatccagcaggctgaccgtgacgatgataagcaccatcagggcgcaggtttgttggaactggaaaccgcgaatcgcttcccacagggtgacgccgatcccgcctgcgccgaccatgccgacgacggtcgccgagcggacgttggattcgaagcgatagagggagtaggagatcagcagtggcatcacctgtggcagcacgccgtagaggatctcttcgagcttgttggcaccggtggcgcgaatgccttccaccgggccgggctcaatcgcttccaccgcttcggaaagcagcttggagagcacgccggtggtgtggataaacagcgccagcacgccagcacgccagcgaacgggccgaggccgacggcgaccacgaacagcatggcgaagaccatttcgttaatggcgcggcaggcgtccatcaggcggcgaacgggctggtaaacccaccacggcaccaggttttcggcgctcatcaggccaaaggggatggagagaaccaccgccagcgcggtgccccagacggcgatttgcagcgtgacggccatttcggtgaggtaatcctgccactggctgaaatcgggcgggaagaagtcggcggcgaacgtcgccatgttgccgccgtctttgatcagcgtaagcggggccatttccgcgccctgccacgagacgaccaacacggcgagtacaacggcccagctcagaagcgagaaccagctgcgcttgggtggggcgatggtgatggtttgcatgtttggctccggtctgtaggccggataaggtgcttgcaccgcatccggcatcaacgcctgcacattgtcggatgcgacgccggggcgtcttatccgacctacgatttactgcaccgctttactcacgctactcatcgcgcttagcgcgttgttcaggcggtccaggtcatccagctgcgcctgaatctcggtggtttttgccagcttgtcctgctcattcagtcctttattgcttttcacgccctgcatctctttaaacagcgcgagctggcgaatcggcaccagttgcaggtcgctggaagcgcggaatggcgcccagcccaggcgttccagcaccgctttttcttccggcgttttgccgtagttcataaagaagtcgtagatcttgtctttggtggtttcggaaagattcttgcgccagacgatcggatcgcctgggatcagcgggctcttccagatcaccttcagttctttcagcttctctggcgcggaggttttcagcttgtcgaggttttcggtgttgttggtggcaacatccacctgcttgttggcgacggccagcgcgttggtttcatgcccggcgttgacggtgcgcttgaagtcgctggcggagatattgtttttggcgaagacgtagtagccggggacgaggaagccagaggtggagttaggatcgccattgccaaaggtgagatctttccgcttcgccagcagatcgttcaggttgttgatcggactgtctttgttgacgatcaacacgctccagtaacccgggcttccatccgccgcgaccgtctgggcgaagacctggccattggcgcgatccaccgcttccatcgcgctcagattgccgtaccaggcgatatccactttattgaagcgcatcccctggataatgcccgcgtagtccggggcaaagaaggcgttgaccttcacgcccagcttcttctccatatcctgcaagaacggcgtccattgcggtttcaggttttgctgactttccgtactaataatgccgaaattcaacgccttttcctgctcttcggcgtgcgccgggcttaacagggtgctgaggctgaacatgctggtgaaggccaggctggcaattatcttagcgttcattcgttttcctcaatgatggggatgtcaggcagctttcgcgttctcttcgacgcggttaatgctgcggtagagatggtcaaaacgttcgttatcaaactgttggctgctgccgtcgtagaagacgtgcccctggcgcagggcgacgatgcgttcgcagtagcgcagggcgtaatccacctgatgcagcgtgacgaccacggtgatgccgtcgttctggttgatgtcgcgcagggtgtccatcacgatgcgcgcactttctgggtccaggctggcgatgggttcatcggccagaatcactttcgcctgctgcatcagcgcacgggcaatcgccacacgttgctgctggccgccggagagggtggaaacgcgctgatgggcaaaatgcaccatgccaacgcgggtcagcgcctgtaacgcgcgctgtttctgctcgccggtgaaccagctaaaacaggtgcgccagaacggcgtgctgccgagcgcgccaatcagcacgttctccagtacgctcaggcggttcaccaggttgaattgttggaatatgtagccggtatgggcgcggcttttgcggatatcgcgggccaggcggccttcgcgctggactgtgcggcccagcagctcgatatggctaccgacagatttatcgccggtaatcaaaccgcttaagtgacgtaaaagggtggattttccggaaccgctcggcccaagcagagccaccatttcaccgtgatgaatgttcagatcaaccgcatgcagcgcctgatgctgattgaaggttttggcgagcttctcgacacggataatcgtttgcatgatgcagcctccctaaaaaagtggctccatcgtggcggattattgtgacgatttggttaattaaaagtgactaacagatgaagagttaacgggaattcgatgacagtgcgggagggcgggcctcccggcgggttattgcgttggttgttgtttgacgacattaatcatccacggtacgccaaatttatcggtgactttgccaaagccatgcgcccagaaagtttcctgccaggccatttcgatttttccgttagcggcaagattgtcaaaccagcgttttccttcttcgacctgttggctatcgagcaccagcgtaaagccggagtagctggcttttccactcggcatggcatcgctcatcatgatgtcgcttccggcaatgcgcacattggcgtgggcgatggcggtatcgggaaattgcattccggaagggcagttctcggcgctgtcctgcgcactttttggcatttcgccgaagctgattttatagagcagttccgcgcccaacgtacgttgataataggcaatcgcgtcggaacagttaccggcaaaagagaggtagggacttaacggcatgatggtgacctcagttaagagaagccagttaagtgtagttcgaaatttatacagatgagaggcggcctgataagacgcgcgagcgtcgcatcaggcagtcggcactgttgccggatgcggcgtaaacgccttatccggcctacggagggtgcgggaatttgtaggcctgataagacgcgcaagcgtcgcatcaggcagtcggcaccattgccggatgcggcgtaaacgccttatccggcctacggagggtgcgggaatttgtaggcctgataagacgcgcaagcgtcgcatcaggcagtcggcaccgttgccggatgcggcgtaaacgccttatccggcctacggatggtgcgggaatttgtaggcctgataagacgcgcaagcgtcgcatcaggcagttggcactgttgccggatgcggcgtaaacgccttatccggcctacggagggtgcgggaatttgtaggcctgataagacgcgcaagcgtcgcatcaggcagtcggcaccgttgccggatgcggcgtaaacgccttatccggcctacggagggtgcgggaatttgtaggcctgataagacgcgcaagcgtcgcatcaggcatctggcaccgttgccggatgcggcgcgagcgccttatccggcttaccgatcacaatacaatcagttctttttcacaaactcagatttcagtttcatcggaccaaaaccgtcgattttgcaatcgatgttatggtcgccttcaaccaggcggatgtttttcactttggtgccaattttcagcatgctagagctacctttcaccttcagatctttaatgatggtaacgctgtcgccgtcagccagcagattgccgttagcatctttaacgatcagctcgtcgctttcctgtgcaggttctgcgtcgttccattcgtaggcacattccgggcagatgtacatgccgttatcttcgtaggtgtattcggagttgcattttgggcagtgtggtaaactcatgtggatttcctcaaaagtcagcagggcaaaagcgccaaaaaacggcagattgccgaaaaaggccgcaattatacacaaaatccctgagtttgtcgggggtactgctgattttagacgacgatcgttttcatttgaaaggaaacgcaaaaagaaaataatctttttgcctctatttattatttaagataatgttaatgctctacttgttctttttttaattcacatgatatttttatctttctgacgttttaaacgtatcagaagacgttatttattctgataaaaaacaacacactaaatataaaattatttcttgcagtaattataaaagccgaaaacagaactcaaaaacaatctggctaaataaaataacaaaatttgctttaaggaagaattttctatgtacacacagaccctgtatgagttaagtcaggaggctgaacgcctgttacagctttctcgccaacagttgcagttactggaaaaaatgcctctctctgtacccggagacgacgcgccacaactggctttaccctggagtcagcctaatatcgccgaacgtcacgcgatgctgaataatgagttgcgtaaaatttcccgactggaaatggtgcttgcaattgtcggtaccatgaaagcagggaaaagtaccaccattaatgccattgttggtacggaggttctgcctaatcgtaatcgcccaatgactgcgctgccgacgcttattcgccatacgcccgggcaaaaggaaccggtactgcattttagtcatgtcgcgccaatcgattgtttaattcaacaattacaacagcgcctgcgtgattgcgatattaagcatctgaccgatgtgctggaaatagataaagatatgcgtgcgcttatgcagcggatcgaaaatggcgtcgctttcgaaaaatattatctgggtgcccagcctatttttcattgtctgaaaagtttgaatgatttagtgcgactggcgaaggcgctggacgtcgattttcctttttctgcttacgccgccattgagcatattcccgtgattgaagtggagtttgtccatctagcggggctggagagttatcccggtcagttgacgttactggatacccccgggccaaatgaagccgggcaaccgcatctgcaaaaaatgcttaaccagcagctggcacgcgccagcgcggtactggcggtgctggattatacgcaactgaaaagcatctccgatgaagaggtccgtgaggcgattttggcggtggggcaaagcgtgccgctgtacgtgctggtcaataagttcgatcaacaggatcgtaacagtgacgacgccgaccaggtgcgggcactgatttccgggacgctgatgaaaggctgtattacgccacagcagatatttccggtgagcagcatgtggggctacctggcgaatcgggcgcgctatgagttagccaacaacggtaagttaccaccgccagagcaacaacgctgggtggaagattttgcccatgccgcgcttggcaggcgctggcgtcatgccgatctggcggacctcgaacatattcgtcatgctgccgatcagttgtgggaagatagcctgttcgcccagccaattcaggcgttgcttcatgccgcttacgctaacgccagcttgtatgctctgcgatctgccgcgcataaactgttgaattacgcgcagcaggcgcgggaatacctggattttcgtgcgcacgggttaaacgtcgcttgtgaacaattgcggcaaaatatccaccagatcgaagaaagtttgcagctattgcaactcaatcaggcgcaggtgagcggcgagattaaacatgaaatcgagctggccctgacctccgccaaccactttctgcgtcaacagcaagatgcgctgaaggtgcagttagccgccttgtttcaggatgatagcgagccgttaagcgagattcgtacccgctgtgagacactgttacagacggcgcagaacaccatcagtcgcgactttacgctgcgttttgccgagcttgaatccaccctttgccgggtgttaaccgatgttattcgccccattgagcaacaagtcaaaatggaattgagcgagagtgggtttcgtcctgggtttcattttcctgtttttcacggcgtagttccccacttcaacactcgccagctgttcagtgaagtcattagccgccaggaagcaacggacgagcagagcacgcgtttaggcgttgtgcgtgagacttttagccgctggttgaatcagcccgactggggacggggaaatgagaaaagtccgacagaaacggttgattacagtgtgttgcaacgagcattaagcgcagaagtcgatctctattgccaacaaatggctaaagttctggcagagcaggtcgatgaatctgttacggcaggcatgaatacttttttcgctgagttcgctagttgtttgacggaattacagacgcgtttacgcgaaagtctggctctgcgtcaacaaaatgaaagcgtggtcaggctgatgcagcagcaattgcagcagactgtgatgactcacggctggatttacaccgacgcccagctgttacgcgatgatattcaaacacttttcacggcagaacgatattgaccaagacgttacttgacggccccggtcgcgtgctggagagcgtttatccccgctttttagtggatctggcgcagggtgatgatgcccgccttccacaagcccatcagcagcagtttcgtgaacgactgatgcaggaacttcttagccgtgtgcagcttcagacatggacgaacggcggcatgttaaatgcgccgcttagcctgcgtctgacattggtggaaaaactggcgagcatgctggatcccggtcatctggcactgacgcagatcgcgcagcatctggcgctgctgcaaaaaatggatcaccgccagcactctgctttcccggagctcccccagcaaattgccgccttgtatgagtggtttagtgcccgttgtcgctggaaggaaaaggcgttaacgcaacgaggcctactggtgcaggcaggtgatcagagcgagcaaatttttacccgctggcgtgctggggcgtataacgcctggagcttgcctgggcgctgttttatcgttctggaggagttgcgctggggggcatttggcgatgcctgccgtctgggaagcccgcaagcggtggcgttgttgctgggtgatttgctcgagaaagcgacacaacatctggcagagagtatcaatgcggcaccgaccacgcgtcactattaccatcagtggtttgcctctagcaccgttccgacgggcggggagcatgctgattttttaagttggctgggaaagtggaccacggcagataaacaacccgtttgctggagtgtgacccaacgctggcaaactgtcgcgctggggatgccacgactctgtagtgcgcagcgtctggcgggggcaatgctcgaggaaatcttctctgtaaatttggcgtaaataatcagttacatcaatgagtcctaaacgaaatccatgtgtgaagttgatcacaaatttaaacactggtagggtaaaaaggtcattaactgcccaattcaggcgtcaactggtttgattgtacattccttaaccggagggtgtaagcaaacccgctacgcttgttacagagattgcatcctgcaattcccgctccccttttgcggccgtcgcgctgatttttctggcgtttgcggaaatgggccaactctgcgaggaaagctatgctgaaaaggaaaaaagtaaaaccgattacccttcgtgatgtcaccattattgatgacggtaaactgcgtaaagccattaccgcagcaagtctgggtaatgcaatggaatggttcgattttggtgtttatggttttgttgcttacgcattaggtaaagtttttttcccgggggctgaccccagcgtgcagatggttgctgcacttgccactttctccgttccctttctgattcgaccgcttggcggactcttctttggtatgttgggcgataaatatggtcgccagaagatcctcgctatcactattgtgattatgagcatcagtacgttctgtattggcttaataccgtcctacgacacgattggtatttgggcaccgattctgctgttgatctgtaagatggcacaaggtttcagcgtcggcggtgaatataccggggcgagcatatttgttgcggaatactcccctgaccgtaaacgtggctttatgggcagctggctggacttcggttctattgccgggtttgtgctgggtgcgggcgtggtggtgttaattagcaccattgtcggcgaagcgaacttcctcgattggggctggcgtattccgttctttatcgctctgccgttagggattatcgggctttacctgcgccatgcgctggaagagactccggcgttccagcagcatgtcgataaactggaacagggcgaccgtgaaggtttgcaggatggcccgaaagtcagctttaaagagattgccactaaatactggcgcagcctgttgacatgtattggtctggtaattgccaccaacgtgacttactacatgttgctgacctatatgccgagttatttgagccataacctgcattactccgaagaccacggggtgctgattattatcgccattatgatcggtatgctgtttgtccagccggtgatgggcttgctgagtgaccgttttggccgtcgtccgtttgtgctacttggtagtgttgccctgtttgtgttggcgatcccggcgtttattctgattaacagtaacgtcatcggcctgatttttgccgggttactgatgctggcggtgatccttaactgctttacgggcgttatggcttctaccttgccagcgatgttcccgacgcatatccgttacagcgcgctggcggcggcatttaatattagcgtgctggttgccggtctgacgccaacgctggcggcctggctggtcgaaagcagccagaatctgatgatgcctgcctattacctgatggtagtggcggtggttggtttaatcaccggcgtaaccatgaaagagacggcaaatcgtccgttgaaaggtgcgacaccggcggcgagtgatatacaggaagcgaaggaaattctcgtcgagcattacgataatatcgagcagaaaatcgatgatattgaccacgagattgccgatttgcaggcgaaacgtacccgcctggtgcagcaacatccgcgaattgatgaataagctgaaacggatggcctgatgtgacgctgtcttatcaggccaattgaactcttaaggttcacttaatctctgacgcgcatactctcctccaggttaacggaggagagtgcaatgaaaaaccgtgtttatgaaagtttaactaccgtgttcagcgtgctggtggtcagcagctttctttatatctggtttgccacgtactgatctttcttcagccgtacccaggcccgcgtgccggaagtctcttgccggttttgcaggaaaaactgcccgtgatgcaactgtgtaatgcggctgacaatacttaaccccagaccaatcccgccataacggctgtccatacgtacaaacgctttactcaactccccgcatttactctcatcaatacctggtccttcatcttcaactgccatgaccgctccgtcatcttcttgcagcttaatcataatgttgctgccttgcgggctgtaacgatgggcgttttctaccaggtttcgcaataacatccgcagcagggttgcatcaccctgaacggtgatgtcggcggcgctctctggcaatagcagggtttgctgtcgctggtcgagcatggtactgagttcgtcatagctggggagaatgacatcttccagcagttttacatgttgataattaccggaagaaaaactctgtccggcacgcgccagttgcagcagctgggagacgctctccatcatctgatcaagccgtgccactaacggtgctacatcaatgtgatgcgttttcgccagcagttccagatgcaaacgcacccccgccagtggcgttcgcagttcgtgcgcgacgtcagcggtaaacaacctttcgttatccagcgtgctggtcaggcgactgaccagatcgtttaacgcgctaaccaccgcttcgatttcgagggtggcgctgtgaatggcaatgggcgttaagttgtcggcggtgcgcgcttccagctctttttgcagctccgccagcgggcgggtgatgcggcgtaccgcctgatagcagataaatagcgtcaggctgaccataaagacgccggggacaatcaggctggcgaccgcctcgcggatctcacgcatgatgtggcgatcgttgttgcgattgtcgcgtagcgcctgctcaaacagctgaatctgctcggtactttcatgccatagccagaagacgctgatcagctcaaacaccaacaaaatggccccgatggtcaatatcagccgttggcgcaggcttattggtcggcgcagaaaatgcatcagattcaattagttttcctcattcgcgaccagcatatagccaaagccgcgcacggtgcggatacgggctttgcccactttgtcgcgcagattgtggatatgcacttccagggtgttggtgctgggttcattgtcccagttatagatgtcgttgtagagaatttcccgatgcaccggactgcctgctttgagcattaaccgactcagcagagcatattctttgggcgtcagaatcaactcttcaccgcccatccatacctgacggcgacccatgttcagcgtcagattgccaacaatcagctcactttcgccctgattattatggcgtcgtagcagggcgcggatacgggcatgtaactcttccagcgcaaaaggcttcaccagatagtcgtcggcaccgacatccagcccggcgattttgtcggtcagcgtatcgcgagcggtgaggatcagtaccggcagggtatattttttctgccggatacgggcgagaaaatgcagtccatcttcgtcgggtaaccctaaatccagtaccaccaggctgtaatgacctgcctcaaggctttgttccgccatccgcgcggttgtcacgctatcgcacgcgtagccttcggtttgcgccgccagaatcagtccctgcaataacagcgtatcgtcttcaacaatcagaattttcattcactcactctcctgcaagtttgcagaatatcatccgcagcctggtaatacttcgtctcaacgccagttaatcccaatagcgtggagaataaattgtcttgactatagtgttgcgtttgcgcctgtttttgcaggcagttctggtcaacctgataccgtttttgataatcctcgctcagccacagcagcatcggcacctgtttttggctatccggggcgatggcataaggcagaccgtgcagatagatgccattttcacctaagctttcaccgtggtcagaaagataaaccaggctggtggtaaatttatcctgatgttctttcagcagattaatcgctttatcaacaatatagtcgacgtaaaccagcgtgttgtcgtaagtgttcaccagttgctctttggtacaggtctggatctcattggtgtcgcaggttggggtaaatttcctgaactgaggcggatagcggttgtaataggtcggaccgtggctgccgatggtgtgtaagacaatcacgccatcaccttgcaggttattgatgtactcttcaagcccgtggaacagcacttcgtcatagcattcgccgttgatgcactgatcaggtagattcagcgcggtgacgttctggtgaggcacgcggtcgcaggcacctttacagccgccatcgttgtcattccacagcacgttgatgcccgctcgctgaatgatatccagcacgccttcctggtgctgtgccagctcttctttgtagtgctcacgcggcatatcgctgaacatgcacggtacactaactgccgttgccgtgccgcaagatgcggtattagggaaatagaccacgttatctttcgccagccgcgggttagtttcacgcgggtagccgttgagggagaagttctccgcccggctggtttcgccgacaatcaggatggtcaaatttttacgtttttcgttctgcattaacgggttgcggtgcgcgtcttcaccaattcgcaccagcggcagatttgccagtcgctgatgggagtaccaactccagctggcaacaatgctgttagaggggcttaaggatttcaccagctctttgttattgcggaacaagctggcgtagtctttataaaacagtgcggcgaccagcaaaatcagtagtacagaaaccagaatattggctccacggaaaagaacactgcgcagacggctggtggcaggtttgatttttatccagcaggcaatcagcgcagcaagcacgccgctgaatcccagcgttaataacatttgcggtgtcatcagcgcataactttctgccggagtggtatcaataatattggcaatcatgctgcggtcgatgacgatgccgtaagtcattatgaaatattgtgcagccgcgccaaccagaataaacaggcaggccagtggtcgattaagccataagaaagagcttagtgtcaggacaatattaatcacgctgaaagcgacgaccggcatgctcaagaaaaccagtacgttatgcaggctatccagcggcagcgcctgcaacacctgtttaaaaaaggcaatattcaggcagatagagatataaaaagcggccaacaatagccaggcgagtaaattcaaagagggtctttttagtaggcgcttcaacatcacggtgtttccatcgaacaaagtgcgcatatgctcgcaaagcaaaattaagccaaccttaagttcttaaggttggcttttatgtttgctggattaaggggaattaatctttgcttattggtgcatctaagggatacgggtttttatgtagccggttgtaattcagcgcatacatggcggtgatgaccatcagggtgacaaaactccacataacctctttcgctccggaccccaccacggcccagatgcagtagaggaaggcaatggtagtaactgccagatatgccgggcgtgctttaccaaagtgaccgtgtccgagcagcagtaacgccgcacaggtgtaaagatatggcaccagtgtaaagatgacgctgacggaagaaaccagaccgaactctttggtcgcgtttggactaatgctgctgagctggaagatggtcatcaaaataccgacgataatcagccccgccactggcgtacccgctttatttacacgggcaaaaatcggtgggaacagtccgtcatcggcagcggctttcgccgtttgacccgccagcaacgtccagccgcccagactacctaagcaacccgcagctgcgcagaaggaaacaatggccccggcggtgtcacccaacgccatccgtgcggcatcaccgaatgggctagcagaaacgcgcagtgcggcattagggatcatccccataatcgcggtggtagaaagtacatagcaaacggcggcaatcaataccccaccaatggtggcgatagggacattgcgtttcgggtttttcaccacacctgcggcaacggaggcactttccacaccgatgaagctccacagcgtaacgttaagggtactttgaattgcaccgaaggtgcccaggccgctgacgttccatgccgccatataggtttcaccacggaaccagaaccagccaaatacggcaatcccgacgatggggatcagcgccagcacggtggcaactgcctgcacacgggtgatcattttcggaccgacaatgttcagcaggacgaagatccacagcaccacgacgcaggtgatggttaataccaatggatctttcagaatcgggaagaagtaacttaaatatcctacgccaatgaccaccatggcgatattgccgatccagcaggccagccagtagaggacgttggtttgataaccgagaaacgggccaaagcagcggcgggcgtaagcgtaagaaccaccaggacttgggtcgaggaagctcattttggcgtataccatgctgagccccagtgcaccgataatcgtcaccaaccatccataaatggcaatcccgccagtagaggccaggtttgcaggtaacagaaaaacaccactccccataatattcccgctcaccatcagggtgacggggattaagcccactttgtgagcatcagcatcgctagacataattaaactcctgcgaaggcgagcttcgtgacaataaattacgtcatatcatacgcctgcattcgatagttgaattattatcgaccgggttatcgctgatgccgttattaatatagctcttcgttaaggttaaaaatcaggcgacagtgcgttctctgtgctgactaacataatgcagcggcgtcataccgtagaagtctttaaagacagaaataaagtagctcgtactgttgtagccgcaggactgacttacctgagagatatttttaccgtccatcattaattcatttacggcataacgcatgcggcaggtggtgattatttggctataactggtgttttcgcttttcaactttttctttaacagacttgggctaagacataaacaactggctaccatactaagattccagtctttgtgaatatcgctttcaataatttgataaacgctgtcacttacacaattacgtaacatatacatcattaaactaacgaattttttactgtcgagaaaacgggatagcaccgtgaataataatgcgcgtgttcgttccttttcactctcagtttctgcgggcatcatgctgtgttgcgcggcaacgcgaaagacgtctggcgtcaggcatggcagggtgagtatgggcgtagcgctacgttgccatactggtatttggctgagatctttattcagaaaccggaggtaatctttgatgatgtcgtgactaatatgagcaaccaaagtgttgttaagagaggagacgtcgataatattattttcacaatttaataacgccatatggttagctttaaggctaataggttctttcccattcacccttatccagacatctttttcagtcaataaaacaatacaaggttggtcgctgcaaatcctcatacatgtactcctgagtgcgaataaaagaccagttctcgctaaagcaaagcgataccgggaaatggttatataattgtatgatgaatataaacatgcataaaaataacgagttttactaatagtacaaatttttatagtaatttctcatgtacatatttttttacaggataaataacaggcaaaaaaaagcgcggggtggggccgcgcaaaaagtatgacatttttgtttgcagcaatttttatgaaaacgttgccatactcaaaaggcctaaggccaggcggcgtaatgttatttaaacaattacgccttcagcggaatagtggttacgctttcacgcacataacgtggtaaataccgtcaataatttcagtcccttcagtttcgtgttcaaatccagggaaatggtggtcccaggattgcaggctgcgtaaataacttacttgcggactgtttttatcgccgaagttttcaccagacagcagcatcgggattcctggcggatacgggataacactgtttgccgcgatgcgtcctggcagattttcaatggataccagttcgacattgttgtcgacaatcgcgttgtacgcttcacgcggggtgacttccgccaccggcaggccggaataggcttcgttcaaccgtgcgccagggttgttttctttcagccaggcaaacatggtgtcacccagatcgtgaatccccatgttcgcgtaagtgtcaggatattgttcaacaagttccggcatcacctgcgccagcggtgtgttggcgtcatagtggcgtttgaaggagcaaagggtgttaaccagagttccccatttcccacgggttacgcccatagagaacaggaacataatttggaagtcagtggtgcgggtaggtacaatgccgtggcgaccaagccaggcagtgaccagcgccgccggaacaccggtttcttccagttcaccatcttcacccattcccggagcaaggatgctgactttaatcgggtcgagcatactccagttatccggaatatctttgaagccgtgccagctttcgcccggatgcattacccagcagtcctgaacggtggtcagcagtttggttggtgcgtcagcaaagtcataggttttgccggtttgtgggtcggtgacgacttctttgttccacggtttgaagaaccagctaccgtcagcggtgaactctttatatagccgcgccatcgcctgacggaaatcaaccgcttcgtcaatcacttcctgtgtcagactcaggccgctgttgccgtccatcatgctcaccgccacgtcgttggatgcgcagatggcatacagcggggaggtggtggcatgcatcatgtaggcctggttgaagcgggagaagttaatcgccccacgaccttcacgtacatgaatataagaagcctgactcagcgcattcagcagtttgtgggtggagtgggtggcgaaaacggtaggaccgttgtgatcgccaggttcgccgcgcatggcatagtgatcggcatagatcgggttgaaacgtgcatagccgtaccaggcttcgtcaaagtgcagacgatcggaggttttttccagcagatcctgcgcttctttagcgttataacacacgccgtcataggtgcagttggtcaccacgcagtaagacggtttttgcccggctttgtctttggtcagcgggctttcactgattttcttctgcaaggtttcaggttgcatttcctgcggatagattggcccgataatgccgtagcggttgcggcttggcaccatatagaccggtttcgcgcctgtcagcatcaaaccttgttcgatggatttatggcagttacggtcaacgaccacgacatcgttatcggtcatgcaagcctgcatgatggtgcggttagagccggaagtaccgacgactacgctccaggagcgatcggcaccaaatacgcgtgcggcatatttttcgctttcgccaaatgcgccagtatggtcaagcaaagaaccgagggaagttcgttcgatgcccatgtcggtgcggaacagattttcaccatagtagtcatggtagaaacgtccggcgggtgttttggtaaaaccaacgccgccctggtggcctggcgctgcccaggaatattcatggatgtcactatatttcatcagcgcgctgaacagtggcggcaacagctgctggcggtagcgggtcatcgcggcaacggcgcgtccggcgataaagtcggcggtatcttccagaatccaggcgaattcatcgacaagctccagcaggtcgcgatccattgcggcgagggctttttcccgatcgcccaacaggaagaccggcacgttttgttggcgctcatgaagcttaccgatcaattgtctgacgttttgatgttcgtccggatgttccatttgatagctgaacatcaggcagtcaatggcttcgttactagagagaatggcaaaaccatcatcaaaggaggtggatttaatcacggtaacattttgctggcttaaagcatctgccagacgctcaacggcgttaccgacccaggtgtcttgatggagaaactcgctttcaacaattaatactttcatcattgcttacccggttatgaaggaatcttcgttgcgggcaagtatcttccggccttttcgggctgtaaagcgcgtgaaaaacaaacatttttgaaatatttagttttataaacaatacgttatgtgattattttaaattattttcactgcttattatcgacggctaaactatttttttggctgatactgatatcgtctttagccgggaaacgtctggcggcgctgttggctaagtttgcggtattgttgcgggctcatgccgacatatttgccgaacgtgctgtaaaaacgactactactacgaaagcctgccgtcagggcaatatcgagaatacttttatcggtatcgctcagtaacgcgcgaacgtggttgatgcgcatcgcggtaatgtactgtttcatcgtcaattgcatgacccgctggaatatccccattgcatagttggcgttaagtttgacgtgctcagccacatcgttgatggtcagcgcctgatcatagttttcggcaataaagcccagcatctggctaacataaaattgcgcatggcggctgacgctgtttttgtgtgtgcggctggttttattgaccagaatcggttcccagccagagaggctaaatcgcttgagcatcaggccaatttcatcaatggcgagctggcgaatttgctcgttcggactgtttaattcctgctgccagcggcgcacttcaaacgggctaagttgctgtgtggccagacttttgatcaccatgccgtgagtgacgtggttaatcaggtctttatccagcggccaggagagaaacagatgcatcggcagattaaaaatcgccatgctctgacaggttccggtatctgttagttggtgcggtgtacaggcccagaacagcgtgatatgaccctgattgatattcactttttcattgttgatcaggtattccacatcgccatcgaaaggcacattcacttcgacctgaccatgccagtggctggtgggcatgatatgcggtgcgcgaaactcaatctccatccgctggtattcgctatacaggctcagcgggctgcgggtctgtttttcgtcgctgctgcacataaacgtatctgtattcatggatggctctctttcctggaatatcagaattatggcaggagtgagggaggatgactgcgagtgggagcacggttttcaccctcttcccagaggggcgaggggactctccgagtatcatgaggccgaaaactctgcttttcaggtaatttattcccataaactcagatttactgctgcttcacgcaggatctgagtttatgggaatgctcaacctggaagccggaggttttctgcagattcgcctgccatgatgaagttattcaagcaagccaggagatctgcatgatgtctgcacccaaaattacatttatcggcgctggtagcacgattttcgttaaaaatattcttggtgatgtgttccatcgcgaggcgctgaaaacggcgcatattgccctgatggacattgaccccacccgcctggaagagagccatattgtggtgcgtaagctgatggatagtgcaggggccagcggcaaaatcacctgccacacccaacagaaagaagccttagaggatgccgattttgtcgtggtggcatttcagattggcggttatgaaccttgcacggtgactgatttcgaggtctgtaagcggcatggtctggaacaaaccattgccgatacgttggggccgggcggtattatgcgcgcgctacgtaccattccgcatctgtggcaaatttgcgaggacatgacggaagtctgccccgatgccaccatgctcaactatgttaacccaatggcgatgaatacctgggcgatgtatgcccgctatccgcatatcaaacaggtcgggctgtgccatagcgtgcagggaacggcggaagagttggcgcgtgacctcaatatcgacccagctacgctgcgttaccgttgcgcaggtatcaaccatatggcgttttacctggagctggagcgcaaaaccgccgacggcagttatgtgaatctctacccggaactgctggcggcttatgaagcagggcaggcaccgaagccgaatattcatggcaatactcgctgccagaatattgtgcgctacgaaatgttcaaaaagctgggctatttcgtcacggaaagcagtgaacattttgctgagtacacaccgtggtttattaagccaggtcgtgaggatttgattgagcgttataaagtaccgctggatgagtacccgaaacgctgcgtcgagcagctggcgaactggcataaagagctggaggagtataaaaaagcctcccggattgatattaaaccgagtcgggaatatgccagcacaatcatgaacgctatctggactggcgagccgagtgtgatttacggcaacgtccgtaacgatggtttgattgataacctgccacaaggatgttgcgtggaagtagcctgtctggttgatgctaatggcattcagccgaccaaagtcggtacgctacctagccatctggccgccctgatgcaaaccaacatcaacgtacagacgctgctgaccgaagctattcttacggaaaatcgcgaccgtgtttaccacgccgcgatgatggacccgcatactgccgccgtgctgggcattgacgaaatatatgctcttgttgacgacctgattgccgcccacggcgactggctgccaggctggttgcaccgttaaaacgcgactaaacgctactgcgccgggggatttattccggcgcacacctctgacgataccaataacagaaggcgggcgttggtaacagcgacccgataccctatgagcatttcaatgactacaaaactcagttatggatttggagcgttcgggaaggattttgcgatcggcattgtgtatatgtacctcatgtattactacaccgatgtcgtcgggctgtctgtgggtttggtcggtactttgtttctggtggcgaggatctgggatgctattaacgatccgattatgggatggattgtaaatgctacgcgaagccgatggggtaagttcaaaccctggatcctgatcggtacgttggcaaactctgtaatcttatttctcctctttagtgcgcatctgtttgaaggtactactcagattgtctttgtttgcgtgacctacatcctctggggcatgacttacaccattatggatattcccttctggagcctggttccaaccatcacgctcgataaacgtgagcgcgaacaactggttccttatccgcgtttttttgccagtctggcaggctttgttacggcaggtgtgacgctaccatttgttaattatgtcggcggtggcgatcggggatttggctttcagatgttcactctggtactgatcgccttttttattgttagtaccatcatcactctgcgcaatgtgcatgaagtctttagcagtgacaatcaaccgtctgctgaaggaagccatctgacacttaaagccatcgttgcgctaatttataaaaacgatcagcttagttgcctcttgggtatggctcttgcttataatgtagccagcaacattattaccggctttgctatctattatttcagttatgttatcggtgatgcggatttgttcccctattatctgagctatgcgggagctgctaacctggtgacgttagtattcttcccacgcttagttaaaagtttatcccgacgcattttatgggccggagcatctattcttccggtgttaagctgtggtgttctcctgttaatggcattaatgagctatcacaacgtcgtcctcattgtgattgcgggtattttgctgaatgtgggaacggcgcttttctgggtattacaggtcatcatggtggcagatatcgttgattacggtgaatataaactgcacgtacgctgtgaaagtatcgcttactccgtgcagactatggtggtgaagggcggtagtgcctttgcggcttttttcattgcggttgtgttagggatgattggctatgtaccgaatgttgaacagtctacgcaagccctattaggtatgcagtttattatgattgctctaccaactctgtttttcatggtaacgctgattctctacttccgtttctatcgcctcaatggtgacacgctgcgcaggatccagatccatctgctggataaatatcgcaaagtaccgcccgagcctgttcatgctgatattccggtcggtgcagtgagtgatgtgaaagcctgacgtggacaatagctaacgaaaatggcctgatgcgatatgtttatcaggccacgtcttaatgtaatgctttggatttgcaaattttgtagaccggataaggaattcacgccgcatccggcatcaacaaagcgcaagttgttatccggttatcaagccaaagcgccgtagctggcggcaatgaaagcgagcgaggaatatcaccgtcgttaatgcgccaagcagcgcgcagaacatatcggattgcgtgtcccactggtcgccctgggtgccgagaaaatcatccgctccctgacccattgccagcgctgcccaccactcgattaattcatacatcgcgcttatcgccagcgccacgcagcagaccaggaacgccaccattttacgtccgcgcacgtacatcccgcgaacgagaatttctcgtgccaccagtgcaggcaccagcccctggaaaaagtgccccagcttgtcatacggattacgactcaaccccagccattcctgcacctcaaaaccaacggggactttcgcgtaggtgtattgtccgccgaccatcaggatgatggcgtgaaggaaaatgagcgtatagagcagcggcgttaacggataacgtctggcggtggcaagcagtagctgcacgacaataatcaccggtgtcacttccatcagccaggtgagtttgtcatgggcgctaatgccggtataaatcaggattaacgttagcgtcagtgcgctggtgttaagaattaacggcttgagtgtgcgggtcatggtgagttcgcaaatcagggaaaatactgactattcaccagcaagcgtgaaattacaatcgcaaaagaggtggccagggggatcacctggcagcatgctgccaggcgctgggccgaagaggttacttagtgcagttcgcgcactgtttgttgacgatttgctggaagaagtcgttacctttgtcatcgaccaggataaacgccgggaaatcttctacttcgattttccagatagcttccatacccagctccggataagcgacgcactccagatgcttgatgctctgctgcgccagtaccgccgccggaccgccgatgctaccgaggtagaagccgccgtgtttatgacacgcgtcggtaacctgctgactgcggttacctttcgccagcatgatcatgctgccgccgtgggattgcagcagatccacgtaggagtccatacggcctgcggtggttgggccaagactaccacttggataaccggcaggggttttcgccggacccgcgtagtagatcgggtgatctttgatgtactgcggaagttctttaccggcgtcaatcagctctttcagcttggcgtgtgcaatatctcggcccacgataatggtgccggtgaggctcaaacgagtggataccgggtattggctaagctgggcgaggatctctttcatcgggcggttaaggtcaactttcaccgcttcgccttcaccggcctggcgcagttcttgtggaatgtactggcctgggttgtgttccagtttttcgatccagataccttcgcggttgattttcgctttaatgttacggtcagcggagcaggagacgcccatgccgaccgggcaggatgcgccgtgacgtggcagacggataacgcgaatgtcgtgcgcgaagtatttaccgccaaactgcgcgccaagaccgagtttctgggcctcttccagcagttcctgttccagctggacatcgcggaacgcctgaccatgttcgttcccttccgtcggcagttcatcgtaatagtgagcgcttgctaacttgacggttttcaggttggtttccgcagacgtaccgccaatcacaaacgcgatatggtacggcgggcaggctgcagtaccgagggtacgcattttctcgacgaggaagtttttcagtttgccgggagtcagcagggctttggtttcctggtagagatacgttttgttggcagagccgccgcctttcgcaacgcaaaggaatttgtactcatcgccatctaccgcgtacaggtcgatttgcgcaggcaggttagtgccggtgttgacctctttgtacatgtccagcgccgcattctgactatagcgcaggttatcttcgatataggtgttatagacgcctttgctcagcgtttcttcatcaccgccgccggtccacacgcgctggccttttttaccgacgatgatcgcggtgccggtatcctggcaggtcggcagcacgcctttggcggcgatttcggagtttcttaagaattgcagcgccacgtacttgtcgttttcgctggcttctggatcgtgaagaatagccgcaacctgtttctggtgtgccgggcggagcataaaagaagcgtcgtgaaaggcttgctgcgccagcagggtcagggcttctggttccactttcaggatggtttcgccgtcgaagtcggcaacgctaacgtaatcggaagtgagtagatagtattcggtattgtctttccccatcgggaaaggtgcctggtagataaagggtttgttactcatagcttccagcctgtaactctgtatttgttattcgaaaatggcgtgccgcgtagtcacgggcggcacgcaaagtgcatttataagaacccgtacatcgcggcgaagatccagccgaagacgcagcttacgctcacaccaatcaaccccggcagaataaagctgtggttgatgacgaagcgaccgatgtgggtggtgccggaacggtcaaactgaatcgctgccagatcgctcggataagtcggcaggatgtaataaccgtagcaagccggtgcactagccacgatgtatgccggatcaacgccgatcgccagcgcgaccggaacaatcgccgccagcgccgcagcctgagagtttacaaacttggaaaccagcagcagaacaatggcataggcccacggatactctttcaccatttcacccagtacgccctgaatttcagacatatgcgcaccgaacatggtttctgccatccatgcgataccgtacaccgccacgatggcgatcataccggaacggaagacttcgtttttactgatagacgcgggattggttttggtcaggataataatcagcgccccggtcagcagcataaacatctgaataaccagtaccatgctcagcggtttgccgccgaaggatggacgcaggtcgctatcagcaccaagaagggcgactacagcgattgccccgaggaaaatccacattgccagccagttgcttttcggcagttttttatccagcagcgtcgcggtatcaccgtaaacatactcacggttttccggtacggagatgaatttctggaactcttcgtctttatccagatctttaccgcggaaccagctgaagataccgatcgccaggataccgattaacgtgcttggaatggtgattgccagcagatcgaggaactcaagatggcgaccatcaaaggtgacattacccagcatcgcaaccagagacacgaccgcaacgctcaccggactggcgataatccccatctgtgcaccgatagaacttgccgccatcggacgttccggacggatgttgttcttaatggcgacgtcgtagatgatcggcagaatggtgtaaaccacatgacccgtaccgcaaagaatggtcagtgtacaggtcacaaacggcgcgacaatactgacatatttcgggttgcggcgcagcagcttctcggcaatttgcagcatgacatcaagaccgccgctagcttgcaaggtcgcgcttgccgccaccaccgcaatgataaccagcatgacatcaactggtggtttacctggctgaaggtggaagacgaagaccagaatgaccagaccgataccgcctaataaacccagcgcgataccaccctttctggcaccataaaacagacatatcagtattatgataagttggatagtaaataacatgtgtgaaccctcgcgataatcctatttaaatttttgctgaatagatcacagtcacgttctgttttgtatgaactgttttcagagcctgactaaatatccgtttggtcgttaccggctttagcaaatacctcacagtgaatattggctgattaaagcagcggcaaatttatgcactgtgataagcggctttttcagagagaaagactctctggcgatgggtttatagtttgtactgcgcagatgttaatgttttgtttgctgttatcttattgatatttatcggtctattttttgttctcagggcagatgtcattaggtttatagattaatctgatctacccatttgtgggtaaaaatacacataatgcgggtgacataatagttaattaacttttgttagcgttttgaaattaaaaacaccgttcacctgaagagatattaatttttagcgatgatggagggataattatatttgatctggcacaagttttactgatgaaggatgtaacttgtgccaggggtattttgcattacggtaataattattacttacagataaccagcgatccgttattggcaatattgtttcagtagactgtagtgttctgcctgaatacggtaacggtaaactggacgccccgtgacgccataatggatactggtgaacaagatgtggcagttgaccagccagatgaggtatttacggcaggaaacacggctaatgttaacctcgttggctagctcgtcggtactaaattcatagtcctgatgcgcgtcaatccactggcacagtgtgcgtaacgtctgcggcgttaagccttttggcaagcgacgaggatcctgttcgttggagctgctgccgtggattagctgatcaagctcggcctggtcataatactgatgtttttccagcgccattttcttttgccgccagccggtgagcgcctcttcaaagcgggaagcctggaagggtttgatcaggtaatccacgacaccgtaatgcaggctatctttaatggttgccgcatcggctgcggaggagatgacaatcacatcacttttgcaacgcgcgttatgcaggacaggcagtaaatcgagcccgttctctttttgcatatagatatcgagcaatatcaggtcgataggcgtatcgctattgaagataatctctttggctttctccagcgtgctggctgttccacagcattgaaagcctgggatttgtgctacgtatcggcgattcagctccgcgaccattgcgtcgtcatcgataattaatacattgatcatctgttgctcctctccccgtcccagggtatctggacaaaaaattgtgtgaaaatcccgggttcgctttccacggcgatgctgccgccgagattttctacctgttgtttgacaagtgctaaaccgacgcctcgctcgcttccttttgtgctgacacctttgtcaaaaatgtgatcgattttatcgggtgcgatccccggtccatcatcattaacttcacagtgcagccagccgtgacggtagtgcaatgttacgctaatttcgcctccgggttccggccctaatgcctccagcgcgttttctatcagatttcccaacgtggtaatcagcgtcgcgacctggtcctcactgccgctgtctggcagctggctttcactgtttaaaatcagcgtatggcctaaatcggtcgcgcggttaatcttgctgattaaaaaaccagcgataaccggagatttgatcttacccagcagagagccaatctcttcctgatagttattggctgttttgagaatgtaatcttccaactgcttataactcttcagatgcaataatccgagaatcacatgcaatttattcataaattcgtgggatcgttcacgaagtgcgtcagcatagttgaccagaccgtcgagtcgctgcatcagtttacgtacttcagttttgtccctgaaggtactaatggcaccgatgataacgccattactgcgcaccggaacggtgttgatcagtaatagccggtctttaatcgtaatctcttcgtcgcggcgcggggtaccgtcgcgtaacacttcgctgacatctaccacctgactccaactgtggcttagcgtgctcagtttctcatcgtcctggctcttacggtaattcagcaattcttgtgcggcatcgttgatcagcgtgacctcgccgcgatcgtccacggcaacgacgccttctttgatagactgcaacatggcctggcgttgctcaaacagcgtggagatttcgtagggttccaggccgaaaaggatttttttcagtaccttaaccagaatgcaggtgccaatcagtccgaccagcatgccaaataatacgctccagataatgctccagcgactgtcattgatctgttgggtcacacggcttaactcaaggccgatcgccaccacgccaatttgtttatgattttcatcgtagatgggggtaaatacgcgtaaagcctgcgccagaaaaccgcgattgatagcgacattttcttcgccattcagcgctttaaggatgtcatcacctttaaatggctgaccaatacgctgggcttcaggatggctgtagcgaagactttgcatatcggtaacgacaataaacagcagatcgttgcgtttgcgtacggcttccgcgatggcctggatgccactctcctgcggttttttctgcaagccctgacggatttccgggctgtcggcgagggtacgcgccactgccagtgccttgttggctagcccatctcgcgtcatatcactgatttggctgaagtaaatcagatgcaccaccaatagcacgctgaacagtaccgcactgaccattaagatcactgtggtactcaatttcatcggacgtttgcgtaacatgcggtagggcaaactatgtctcatcagcttccttgtgtgacaaatttcttaagcattatctctgatgaggcgggtaattcaaagggagtaagaatgattggctatataggggaagagactctggcaacggaaactgccagtgctgtatgaagattccggggctatgcttatagcgataatcatactgatgagagagggaaggtcatggatcaggcgctactggacgggggttatcgctgttataccggcgaaaagatcgatgtctatttcaacactgcgatatgtcagcattctggcaattgcgtacgtggcaacggcaagttatttaatctcaaacgaaagccgtggatcatgccggatgaagtcgacgtcgccactgtggttaaagtgattgatacgtgcccgagcggcgcgctgaaataccgtcataaataagcgagggtaaaatggaaatacgcgaaggccacaataaattttacattaatgacaaacaaggcaagcaaatcgctgaaattgtctttgtgccgaccggagagaatttagcgattatcgaacataccgatgtcgatgaaagcctgaaagggcaagggattggtaaacagctggttgcgaaagtcgtggaaaaaatgcgtcgggaaaaacgaaaaattatcccattatgcccatttgcgaaacatgaatttgataaaacgcgggagtatgatgatattcgcagttgatgggagagtacagagtcacgatatttttcattctctccgcgatgtgatgcaggagagcatctgaagggtagggggatgcacaaagaatgggcagagagcgcgtttttttgtcccaagtcatcccctttactgagcaaaaaaaagaatatctcctatatgagaatcatcaatcggggttaataagttttgcgtccccagagcgtttaatattgataggagtcatattatggaaggtaaaaacaagttcaatacttatgttgtttcttttgattatccaagttcttattccagtgtgttcttaagattaagaagtttgatgtatgatatgaatttctcctctatcgtggctgatgaatatgggataccacgacaattgaatgaaaactccttcgcaataacgacaagcttagccgcaagtgaaatcgaagatttaatcaggctcaaatgcttagacttaccggatattgattttgacctcaacattatgacagttgatgactatttccgtcagttttacaagtaaccaggaaggataagaagaacataaaaaatggcactattctctaaaatattaattttttatgtgattggtgtgaacatatcctttgtcattatctggtttatcagtcatgagaaaacacatattcgtttacttagtgcattcctggtcggaataacctggccaatgagtctgcctgtggcattacttttttctctcttttaagagctgtagttgagtggacccgctggttatcgtgaaacgaagcgtctctcctcaaaactggatttgcggaacgatgaacgaagcagtcgcctgactgcttcgttcattaaagtgaaatttatttctgtgggcgcatcgccgggaagagaataacgtcgcgaatagtatggctgttagtaaacagcataatcattcggtcgataccaatacccagaccagcggttggcggcagaccatattccagcgcagtcacgtaatcttcgtcatagaacatggcttcgtcgtcacctgcagctttagcattaacctgttcctggaaacgttcagcctgatcttctgcgtcgtttaattcgctaaaaccattaccgatttcacgaccaccgatgaagaattcaaaacggtcggtgatttccgggttaacatcattacggcgtgccagcggggacacttctgccggatattccgtaataaaggttggctgaatcagatgtgcttctgccacttcatcaaagatctctgtgacaatacgtcccaacccccagcttttctctaccgtaataccgatagattcagctaatgctttagcagcatcaaaattatccaggtcggccatatcggtttctggacgatattttttgattgcttcgcgcatggtgagtttttcaaacggtttgccgaaatcaaacacatgctcgccataagtgactttagtggtacccagaacctcttgtgccagggtgcggaacagactctctgtcagttcaatcaaatcgtggtaatccgcatacgccatgtagagttccatcattgtgaactcaggattatggcgaacagaaataccttcattacggaagttacggttgatttcgaatacccgttcaaaaccgcctacaaccagacgtttcagatacagctccggcgcgatacgcagatacatatctaaatccagagcattatgatgggtaataaacgggcgagcagatgccccacctggaattacctgcatcatcggggtttctacttccataaagccgcgcgcgaccatgaattgacggatagcggccagaattttactacggacaacaaacgtttgacgggatttatcgttagcgatgaggtccagataacgttgacgataacggacttcctgatcctgcagaccatggaatttatctggtaaaggacgtagtgctttagtcagcaggcgcagctcagtacagtgaatggaaagctcacccgtttgcgtcttaaacagcgtaccgcgggcaccgataatgtcacccagatcccattttttaaactgatcgttataaacaccttctggcaggctatctcttgcaacgtacagttgaatacggccaccgacatcctgcaacgttacaaaggaggctttccccatgatacgacgggtcatcattcggccagcaacgctgacttcaatgtttaaggattccagttcctggttatccttcgcatcaaactcttcgtgcaactggtcagaggtatggtcgcggcgaaaatcattgggaaacgccacaccttgctgacgtagtgccgccagtttttcgcggcgatttctcagttcatcgttaaaatcaatagcctcattggctccccgtgtttcttgttcagacattttggttcctctaaatccagctttcaatttagcgtagataaagagacagatcggtacactgtattatctgcctcgactattagtaactcagtttatcttatcgaaactaacgcttacctcaagttgatatcactaataaataaccatcaaaatggtttaaatgacttattaatctcgatttgttagtgttataaactaaaagttaatttattcataaccaattgtttttacgacagttaatcgttgctctcctgtatcatattcgtcggcgtgctaaacagaaaacgggtagcaaaggccaatacgacgatgatcgcgacacaagccaacgtccactctcccatctgagaaaagaatcgctggtaagctgcaattgccataccgctaatttggctctctgtcgtctgctgtgccacgacgcctgccagccagttggcgaccgcgcctgttgccagcatataaatcccggttaatacgccagacattttcagacgcgtgatttgcgcaatcgccaccgggtcaataaagagttcggcaaagcccattagcgccagcccggatatcatcacgcccatactcgcttgaccgtcagccgctgcatgtcgggcatcaaatgccaacaacataaagccacaagccatcagcagtaagccaaaggcaaacttcagccagacgcgcaatgtactgttgccgcggctttctgggctcgccagccaggccagtacaaccccagcgagcatcaccgcaattgcattcacgctctggaatagtgctgtaggtacttcaatattgaatgcctgacgattcacaaagcgatcgataaacaagctgatggtactgccgccctgttgtgccagtacccagaacaatgtcccgacaaacatcaacaatacaatttgccaaagagcacggcgatgttcggggaatttgatcatcatgcgggcaatgatttgtgcggcaatgaggcaaacgatcgccagcaaatatccggaccagtcgttctccagcagcagagtaaaaaatactggggctaaacagagcatcaccactaaccagctccatactggtaaggcaaatttgacactagtgagcgcttttttatccatactacgtgtggactggaaatgacgatgaccgcttaagaaaatcaacaaaccgataaacatgccgccacccgcaagggcaaagccaacatgccatccataccactgagcagccaggccgcaggcgattggggctgcgatagaaccgatattgcccgcagcatacagcaggctaaaaccgccatcacgtcgatgatcgttctcgtcgtagagctcgccaagcaaacagctgatgttacttttgaataaaccgtagccacaaataatgattgccagcgccagatacaggctaaaggtactatttgtatcaatacccagcaccacatggccaagggtcattaacagcgcgccggcaatcactgcagtgcggttgccgagcaggcggtcggcaagccagccgccgagaataggggtaacgtaaaccagagaagcatatgcgctgaacaggctgatggcatggttatcatcaaaaccaagctgatgggtgagatagagaatgagtaaggcacgcatgccgtaaaaactgaagtactcccagatttggatcgccacgatatagtatatcgcgcgcggctgactgggtgttttcatgtgttctccttatgagcaaaaaagggaagtggcaagccacttcccttgtacgagctaattattttttgctttcttctttcaataccttaacggtatagcggccatcagcctgacggtatgcaccgtgaatatcggtttcaaagcccggatagtgagcgccgatttcacacagcatctgcaggaactccagaaccggacggctttcttcggtgatcatttcacccggcattaccagaggaactcccggcgggtacggaaggatcatattggcgttaatacgacctaccatttcgtcgaggtaaacttcttcggtcataccgtgcagctctttctggaatgcagcatacggagtcattaccatcgtcggcagcacttcaaatgcgcgatacatcagatccggcagattgtggtgaacaatcagtttgtggatattctgagccagttcctgaatacgcatgttttcatagaattcaggatcttcacgatacagagacggcagcatgtttttcacacgcaggttcaggtcgaacgcacgtttaaagtcagtcagagcacgcagcaggctcagtgctttggtcttatcgataccgatgctgaacaggaacagcaggttatacggaccggttttctcaacaacgatgccatgttcgtcgaggtatttcgccacgatgctggccggaataccaaagtcgctcatggtgccgtctttttccatccccggagtcagcagggtgactttgatcgggtcaagatacatgtgctcgttatcgatgtttttgaagccgtgccaggtgctgtcagaacgcagcggccagcattcagtcgtatcgatatgatccggctgccatacatcaaagaaccagccatcagattccgttctcagacgtttgatctctttacggaatttgatcgcacgttcaatagaaccgttgatcagacgcttacctgcattgcctttcatcatcgccgcagcggtttcagtggacgccacgataccgtagtgcggagaagtggtggtgtgcatcatgtaggcttcgttaaaggtttcttcgtttacgtcacctttaacgtggatcatggaagcctgagagaacgccgccagcagtttgtgagtggactgggtttcgtaaatcactttcccttctacacggccaccgctcataccgcatttaccttcgtaaatcggactgaagttggtgtaaggcacccacgcggagtcaaagtggatggatttcacatccagtgttttcttgatgaagtcggtgttgtacagcagaccatcataggtagagttggtaattacagcatgtaccggccaggttgcgtttggtgtttctttcacgcgcttagcaatggtagcgtgctggaattcactctgtgggataccaccaagaataccgtaagcgttacgggtcgggcggaaatagattggcgtaacatcgctcatcatcatcaggtgggtcaggcttttgtggcagttacggtcaatcagaatggtgctgcctgctggagcagagtacataccaacaattttgttcgcagtggaagtaccgttggtcaccatgtagctgcggtctgcgttaaagacgcgagcgatatactgttctgcttctttgtgtggaccactgtgatccagcagagaacccagttcagatacactaatggaaatatcagatttcatggtattcggaccaaagaaatcatagaacaggctacctaccgggcttttctggaatgcagtaccgcccatgtgaccaggagtacagaaagtatatttaccttcacgaacatatttaaacagtgctttagtcagcggaggcagaatagtgttgatatattcgtcagtggtctgcttgatcttattagcaatatcttcagcagcacccagcgcatattcaaagaagctaatctgtaaacgcaggtcattcaggcttacatcgagagtggaatacgtattagcgaacgcgtacaacggcaggttctcgttcattttgctaatttcttcgcacagctcgagattatatttatcccagtcaaaaataacgccgcacagacgcgcattgttttcgatcagttttaataagtcgtcacggtcgttcgggtaaacaatctggaagttcagacgttcaagcgcgcgatgaagttcacggatgggttcttctttaaaataaacccccatgtgattcaatattgcaataacgttcatagtcatatctccaggtaaaaaaggcccctcccaacacatgggacaaaatgaaaggaggagcctcggaaaatacttttaattaatgtgcgttagacgcggtgtggttatccatactgtggctctggcgctcgtgcattttgcgagcgtagaacatcaggataatcaggctgacgatgaaggtacctgccagctcgaaggagcttgcgcccatcagcgcgatgaagcagaacacgcaacccagtacagagcagatcaggctgacaaagttgcggatgttaacgccttcaaaacgaatcaggtcaacgcaagagtagaaatacggcagcatagtcagcagtactgcgataccggtcagttcaccgaacaggtcagatgctttaccaccggcagagttcatcagagtgataaggatcatcagggcagtcattttcactgcagccagcagcagaccttttttcggaataccgttgctgtcgacttcaccataaactttcgggaagttaccgtcgttagcggcacgtacacctgcctggcctaccaacatcatccaggagcccagagaagtcaggcacgcaaaggcggtgaatgcagaaaccagcggcgcagcccagttaccgaggatagtactagcactgattgcaaacggagcaccggaagccgccattacagaagacggatacataccggaaagcacctgagtcgcagcgatgtaaacaatacctgctaaaccagtacccagcatggttgccagcggaacggtacgtttcgggtttttaaccataccagtacttacagctgcggattcaacacccacgaaggcccacaggcagagcagaatacttttaatgatcgcatgaccatcagtggtatccgcagtattccagttagctgcataagttgccgcatcaaaccaatgccagccaacaatagcagtcatcaccacaggaataagaaccagcaccagaccaatagtggttaaacggcttacccaagtaccgccgagcatatttacaaaggtaaatacccagacgatagcaatacaggcgatacccgccggaacaggatcatttaatactgggaagaaggtggaaagataagatacagcggtaataccaatcgccaggttaccaatccagttagcatggtaataaagaacacctgtctgaaaaccaaatgcaggggaaatttctccggcataagcaattgggccaccttgttgcgggttttttgttgccagtcgggcatatacatacgccaggctcattgcaccaataatagagataatccaaccccagatagcaataccaccgatacttgctaggttcgcaggtaataatgcaataccgctccccatcatattaccggcaacaacaccggtacaggcaaatagcccgatcttcttggcagaactcatgctcttctcctaatttcatttttgaatttggagtccgggtcatgatgtataactatttcctgaccagaccaaactggcgataagattactcacgaaaaaaggattaatcctaaagattaggtgaaataacacaaaagtttctgtaagtgagaacttgaggttttttattaacacatcaggatcgcaagttgatatcatgaaaagataaacatttaatgtttacaatggattgcgtgacattctctggttaaatttatgtaataaaaattatgcggcaaataaattgccgcaacatattataccaacaggaacatacaaaaactcaacaacaaatatttccgagcataaatcaacccggagttacttattcactagcaagaaatttgtcgagataaggtacaacataaggaacagaagtctggaatataccattttcaatccagtaaagggtgtttgcccctgggcgtaaattaaaggcggtgagatatgcatcagctgcttcccggttcatccccttcatttcataaaccttgccaagcaacacataatttagccaggacatttcaagatcaatgccagtatttatcgcctggtaagactcatctgttttaccttttaccagagcactgaccgcttttatttgatatataatggacaggttgttcaattccggcagtgtaacaatgttatctatttctgtgttcagtgctgctaattgtttttcatctaaaggatgttgagaatggcgcacgatatcaactaatgctttttctgctctcgcgtaggtaaattctggggaactttgaacaatctcacctaataattcactggcacggttcaaacttttatcatcgccatgcagtaaataatcatgtgcctgataaaaattagttaataacgcaccacgatgcggcaaaattttctggagcgtctcctgcattcgttgtggccacggttggtttaacgctttacttaaactctccagtaaatcattttgaatcgccagctgattaccgttagtgatgacataacgtttatccagcatggtactaccatctgcattgtctaccaattttatgctcataaagcattgttgagcacggtattggcgctgattaacaaacgcaatagataatgttttaccggaactgctcggttcatcaatgttgtagttgattttgtcatgcaccataaaggtggagaaggtgttaagacttgtcgccaccaaatcacccacgcctatcgcgtaagagagctgatacggggaactccagctgttacaacttttatttaccatattaatgtcaatatcgcgtggattgagcaaaatacggcttttgctcataggaagacgtgtatcaagactactaaacgctaccagtgctacacagatacctaagctcaacaggaaaaaaaaccatacccaaaaggtagtgaatcgtttgcttttaactggggattgttcaggtggcgttgcggtgttttgaatgttaagactgtgggagggagaatctgtggcaggaaccgcctctggtatagggggagggctagatagcattatttcctctccctcttcttcgctgtaccagataaccggcaccattaatttatagccgcgctttggtacagtagcgatatagacaggactatcttcatcattatcttttaaactcttacgtagttcactgatactctgcgtcacaacgtgattggtgacaatacttctcttccagacattatcgataagttcatccctgctaagtacttcgccactgtgttgagcaaagaaaaccagaagatcgattaatctcggctcaagggtaagttgacgcccattgcggctaatttggtttatggacggagtaacaagccattcgccaacgcgaactacaggttgttgcataatagaaactcattcgaaaagggaatgatgcaatgataattgccacaacctatttttaccatctatagatgggtttatttacatattattggtgaatgcaagacgttatttttaccagccataaacttcttgattacatagtattacgaaaggattttactgagaaccagaagtaatattccttaccatcaaaattcatcatctttgccaaagaaaaatgttcagaaaataatccatggaaaattgtccggagcacttactattttaatggattgttagtctttgcatgagcaagcgaactgatacatttctctttgttctcattcagaaaatctcatcagtcgccgttcagaccggtgttgtgctttatggatgcgttacgctcctgatgacgtcatttgacgttcaacagcatcacggggccgcacgacatttcacgtcagttagtgctatagctcaggaacaaattttcccgaattgggatatgcccgcaaattgctggtgatgtggggagaatctggttgagttcggtagaattgatttggaggcagaacgcttaaatcgtggcgtcctgaaacgaaaaacggacctccgtggaggtccgtttatatgaatttggtgcccggactcggaatcgaaccaaggacacggggattttcaatcccctgctctaccgactgagctatccgggcaacggggcgcattaaaccgtaatctgcacatctcgtcaacctaatttcagtaaaagcgattcaactgcttaagattgcggcaaatcgcttcttttctgtgtttctgtcaggtcaatgcaccaccctggcggcagcgggcgaagcgcaggatatcttccgccagccgatgtgcagtgtcgacatccgcctggctacgattcaccagcattcggcttaaacagccttccagcaccagttccatctgctttgctaccatcgccggatcgtcaacttccagtgtggttaacagttcgtgggtgaaatcgtaggccgcgcttttttgctgatcggccagttgatgaatagggtggccaggatcgggataaaacgtacaggcagcgataaatagacagcccggatagcggttgtttttaacgcactcgcttaacgcctgataacgtgccagcagcttttgttcggcggtttgcgtttcgtccagcatcagctgacgacgccagacatctatctgttggctaagataacgcagcgcatcgtagaggattgcctctttgtctggccagaagcggcgtagctcgtccagtggataatccacacgttcagcaaccatctccagcgtggtgttggcaatcccttgtaattctaataatttcagggcttctcccagtacatcttcacgttgcacgctattttcctccgtctttcccactgcaagtgtcgttcacggttggcgatcgcgcaaatgtgcgctgaaggtttcagcatccataaagcccgtgacgcgtgcttgtggatgctcctggccttgtccgtcaaaaaagagaattgtcggtaggccaaggacattaagatgctttaacagcgccacatcttgtgcgtcgttggccgtgacgttggcctgaagtaagaccgtgtctgctaacgctttttgcacctgcgggtcgctgaaggtgtatttctcaaactctttacaggcgacgcaccagtcggcataaagatctaacatcaccggtttgcctttggcttcaacgagcgcctgatttaactcatctaccgttttgatttgtgtaaagttgagatgcgtctgagtttgcgcggtatgcgtcgcaccaaatgcccaatcctgaagtgggcgcacgctaaccaatgccgctgccagcagaataatttgcacaatacgcatccagccgcgtttagcctgtaggctggtgataaaggcccagccaaagaatgcgacacccagcgcgctccacaagcgtaatccccatacatcaccaatcactcgctccagcaggaagaccggcagtgcgaggatcacaaaaccaaacgcggttttgacttgttccatccacgggccgcttttcggcagcaagcggttaccaaagacggtaattagcatcagcggcaggcccatgcccaacgcatagagataaagcgtgccgccgcccagccacatgttcccgctttgggcgatatacagcagaatcgcgctaagcggtgcggtggtgcatggactacagatcagtccggcaatcgcccccataacaaacacaccgccaggactgccgccctgttggcgattgctcatcaacgtgagacgtgtttgcaggctagaggggagttgcagggtaaacaagccaaacatactcatcgccagcaaggtaaagacgatggcgaggccaatgagcacgtatgggtgctgtagcgccgcctggaactgtaaccctgcggcggcaaccaccagacccagcgccgtgtaggtcagcgccatcccctgcacataaataaaggtcagcaacaatgctctggcagtggagagccgctgtttaccacccagcacgatgccagaaatcagtgggtacattggcagcacgcatggcgtaaaggcgataccaataccgatcaacaacgcccagagcgcggaaaagggcaattgcgcggtgggctgctcttgctgcggaacagacacaggctgtggcgctgcgttgttggcgaccacttcgcttaacggaacggttttggtttctggcggataacagaaaccggcatcagcacagccctggtaggtgacagttaacgtcgctcccgcactcgcctggttgatggtgacgggaagcgtcagccgatcgcggtaaatctcgcttttgccgtaaaactcatcttcatgccagacgccttgcggcagctgcacgtcggcaattttcgcgtgttccggcgtaatgcggatctgtttacggtagaggtagtaaccgtctttgatctgccaggtcagattaaggtcatgttggttttgctgaaaatcaaaagcaaaggcttgatccgcggggacaaattgactacgtcccggcgcgtcgaataatccggcaaaaacggaagtgctgcaaagtagcaggatcagcgtaaagatgcgttgagccatgagaggtaatctgtgtctccttatgtcagcgtaaagatgcgttgagccaactgaggtaatctgtgtctccgtgtgtaacaggtaaaaccagaagttccggggtttgatatggatgatgagacttcaggcattccagcagtgcctgctggtgagatacggtagtttttaaaatcatctgcacttcgtattcttgctccagcttaccttcccagtaatagagagaggtagcgccggggatcaaggtcgcgcaggccgccagtttttccgccagcactttggcggctaaatcctgggctgtcgcttcatctggtgccgtacatagcaccacgacagacgcggtattgctacttttttcatcaagcataaacacctcgcaagaacagatggaaccgcaagagagaggtcactatacaacggacgggggaaggatgttagtcggcgggaaagaaagcggggcgtgaacgccccgcgattgatcattacagcatgaagctacccagcacgaagccgaagcaaacggccagggcaacacccagagtacccgggatgaagaacggatggttgaagacgaatttaccgatacgggtagtacccgtgtcatccatctgtaccgcagcaaccagcgtcgggtaggtcggcagaatgaacagaccagacaccgcagcgaaagaagcaacagcggtcagcggactaacgttcagtgccagagccatcggcatcagtgcttttgcggttgcagcctgagagtacagcagagcagaagcaaagaagaagatgacggccagcagccacggatgaccctgaatcacttcaccagcggtatctttgatccagtcgatgttgttggaaacgaaagtatcgcccagccacgcaacacccaggatacaaatacaggcgctcatacctgctttgaaggtgctggagttgaggatgttgtcggtatcgactttacagataacggtggtcagagttgcaacgctgagcatgatgatcaggattgcgttggtggtgttcatcagcggtttttcaaccagacccatgcttgggctgttgatgattgcatagataaccacgccaactacgcccagcaggaacagccagacggacgtttttgcaccggatttgatttcaatctgcttttcaccgcgcagttcaaccaggccctcttccagacgcttgcgataaatcggatcgtcagagagtttggagttgaacagcatagtgaccaggaaggacatcaccagaaccgccagcagggtggacgggatgaccacggagagcagatggaggtagctgatgccatgaccttccatcacggaagacatgtaaaccactgccgcactgattgggcttgcggtgatcgcaatctgcgcggataccactgcagtagacagcggacggcaaggtttaacgccttgttccttcgcaacttcagcgataactggcagtgtcgccagagagatgttgccagtaccagcaaagatagtcaggaaataggtcacgatcggtgcgaggatcgtgatgtatttcgggttacggcgcagcagcttttctgtctgatgaaccagatagtccagaccgccagcaacctgcatggcagaaatagcggcgataaccgccatgataatggagatgacatcgaacgggatgttaccgggtttaacgccaatagcggcaagaaccagcacccccaatccgcctgcaaaaccaatacctattccccccaatctggcgcccaagaagatcgccagcaaaactatgatgagttctacaactagcatattagccttccttgttttttaacaagttgatattagattgttatttttaagttactgctcacaagaaaaaaggcacgtcatctgacgtgccttttttatttgtactaccctgtacgattactgttcgctttcatcagtatagcgttttgctttgtaagccgggtgcatcagattctgtacggagaaaatatcgtcaagttccgcttcagtcaacagaccgcgttccagaacgacttcacgtacactcttaccggtttcggcacagattttacccacgatgtcaccgttgtggtgaccgatgaacgggttcaggtaagtaacgataccgatagagttgtaaacgtaaccttcgcacacttctttgttagcagtgatgccgttaatgcatttttccagcaggttgtagcaagcgttggtcagaatgtgaacggattcgaacatggcctggccaatgaccggctccataacgttcaactgcagctgacctgcttctgctgccatggtaacagtggtgtcgttaccgatgactttgaagcatacctggttaaccacttccggaacaaccgggtttactttagctggcatgatggaagagcccgcctgcagttccggcaggttgatctcgttcaggccggcacgtgggccactagagagcaagcgcaggtcgttacagattttggacatcttcacagccaggcgtttcagcgcgccgtgaaccataacataagcgccgcagtcagaggtcgcttcgatcaggtcttcagccggtacgcatgggaagccagtaacttcagccagttttttcactgccagcggagagtactctttcggcgtgttcagaccagtaccgattgctgttgcaccaaggttaacttccagcagcagttcagcggtacgttggatgtttttcacttcttctttcagcaggatgctgaaagcgcggaattcctgaccgagggtcatcggtactgcgtcctgcagctgggtacgacccattttcaggatgtcctggaattcgacagctttacgttcaaagccttcacgcagttggttaatcgcatctaccagcttaatcagggaagagtaaactgcgatacggaaaccggtcgggtaggcgtcgttagtggactgacatttgttaacatggtcgttcgggttcaggtactgatattcacctttttggtgacccatcagttccagaccgatattggccagcacttcgttggtgttcatgtttacggaagtacctgcgccgccctggtagacgtctaccgggaactgatccatgcattttccgttgttcaggacttcatcacatgcggcaatgatggcattcgctacacttttaggaatggtttgcagctctttgtttgccatagctgcggcttttttaaccattaccataccgcgaacaaattcaggaatatcactgattttgttgttgctgatatagaagttttcaatcgctctcagagtgtgaacaccatagtaggcatcagctggaacttccctggtacccaacagatcttcttcgatacgaatgttgttactcatgtgaaccttctttttcaagctgccaatgatttgctttaaacacacagaatatatgtggtttcgaatgtttttcgaccgacgattatcccctgcatcgaccgaatacccgagatcatatgctgcttgaggatttctaccgtaatctggatcactttaagtgtcggtttttaccccttaattattaatttgtgaaatagatcaccgctttgggattactaccaaaaatagttgcgcaaacatcttgaaattttgctaatgaccacaatataagctaaacgcgattcgcaacccattcaggtagccggggttaaccggctgctattacaggagaaacctttgcgctggttaccttttattgccattttcctttatgtctatattgagattagtatctttattcaggttgcccatgtattgggggtattgctgaccctcgtgctggttatattcacgagtgttatcggtatgagtctggtacgtaaccagggctttaagaatttcgtgctgatgcagcaaaaaatggcggcgggtgaaaacccagcggcggagatgattaaaagtgttagcctgatcattgctggtttgctgcttttattaccgggcttttttaccgacttcctcggtcttctacttttattgccgccggtgcaaaagcatctgacagtgaagttgatgccgcatttgcgcttttctcgcatgcctggcggcggttttagcgccgggaccggtggcggtaatacttttgatggtgagtaccagcgaaaggatgatgagcgcgaccgccttgatcataaagacgatcgccaggattaatgtcgaaacgccggattatgtggttatgccattttccggcgtttttcgttttggcagcaacagccataaccccgccagcatgatcagcgcatagagacttttccagccgaccattgccagtaacagaacgcataacagcccgccaaccaccgccagtagtcgataacgtccttgcaataatttacagcctgccagcatgcataacagataaatcataataaagatgccattggcataaataataagagcgtccagattgatctctaaagcatgaatcaccaaagtgctcaccacacagcagccgagcaccgcattgagggcattattcgggatatggcgagaagagaggcgtgccaggtagtggtcaggattatgttgcgcctggctccagaccaggcgggcgaagctctgtatataaatgttgagactggcaaagcaggccagatagccaatcacgcaggcaatccataacgctcctacaccgaacaactgcactacaatttttggaaggcttgctgccgccgccattttttcaccataggcgtcgaagtgtaagacgactaccgtacagccccagtagactaatcctgccagcagcagaccaatcatcaaagcacgaggaaaatcacgctctggatttttaaattcgctggcgagatgggcaaatgcctccagaccgacaaaacaccagaacatcacacttaacgcagcaaataacccggtaagttcgatattaccaggtgccggaaaggggatattcgcaggtttgatatcgcccgcccaccagatagcgacaatcagcgcgacgataagtccggcaataacggtttgtagattagcactggaactggcaccgcgagtaccgatataccacaccagcgccagcgtaccgagttctgccaacaacagttgccagctatgccagccaaacatcgcctggccgaacccggcggcaatttgtagtgcggcaggcaaacccacgggaatgacgcttaaaaacagccagccggtgactcgctcaagccggctaccaaacgccataccgacgaagtgcgcgacgccgcctgcgctgggatagtggcgacccagaatcgcaaacacaatcgcaatcgggaacactaagataatcaaaacgggccacgcccacaggctgttattgcccgctaccagcgcagctaacgcaggaacggcaaacacgccagtgcctaataaactcgtgcttagcaggccaatgccctgggccagccccagttcttgtttgagtccactcatgggttgatgtccgattgcgcccaaattttgggcaactgcgtagattttcgatggtagcacaatcagattcgcttatgacggcgatgaagaaattgcgatgaaatgtgaggtgaatcagggttttcacccgattttgtgctgatcagaattttttttctttttcccccttgaaggggcgaagcctcatccccatttctctggtcaccagccgggaaaccacgtaagctccggcgtcacccataacagatacggactttctcaaaggagagttatcaatgaatattcgtccattgcatgatcgcgtgatcgtcaagcgtaaagaagttgaaactaaatctgctggcggcatcgttctgaccggctctgcagcggctaaatccacccgcggcgaagtgctggctgtcggcaatggccgtatccttgaaaatggcgaagtgaagccgctggatgtgaaagttggcgacatcgttattttcaacgatggctacggtgtgaaatctgagaagatcgacaatgaagaagtgttgatcatgtccgaaagcgacattctggcaattgttgaagcgtaatccgcgcacgacactgaacatacgaatttaaggaataaagataatggcagctaaagacgtaaaattcggtaacgacgctcgtgtgaaaatgctgcgcggcgtaaacgtactggcagatgcagtgaaagttaccctcggtccaaaaggccgtaacgtagttctggataaatctttcggtgcaccgaccatcaccaaagatggtgtttccgttgctcgtgaaatcgaactggaagacaagttcgaaaatatgggtgcgcagatggtgaaagaagttgcctctaaagcaaacgacgctgcaggcgacggtaccaccactgcaaccgtactggctcaggctatcatcactgaaggtctgaaagctgttgctgcgggcatgaacccgatggacctgaaacgtggtatcgacaaagcggttaccgctgcagttgaagaactgaaagcgctgtccgtaccatgctctgactctaaagcgattgctcaggttggtaccatctccgctaactccgacgaaaccgtaggtaaactgatcgctgaagcgatggacaaagtcggtaaagaaggcgttatcaccgttgaagacggtaccggtctgcaggacgaactggacgtggttgaaggtatgcagttcgaccgtggctacctgtctccttacttcatcaacaagccggaaactggcgcagtagaactggaaagcccgttcatcctgctggctgacaagaaaatctccaacatccgcgaaatgctgccggttctggaagctgttgccaaagcaggcaaaccgctgctgatcatcgctgaagatgtagaaggcgaagcgctggcaactctggttgttaacaccatgcgtggcatcgtgaaagtcgctgcggttaaagcaccgggcttcggcgatcgtcgtaaagctatgctgcaggatatcgcaaccctgactggcggtaccgtgatctctgaagagatcggtatggagctggaaaaagcaaccctggaagacctgggtcaggctaaacgtgttgtgatcaacaaagacaccaccactatcatcgatggcgtgggtgaagaagctgcaatccagggccgtgttgctcagatccgtcagcagattgaagaagcaacttctgactacgaccgtgaaaaactgcaggaacgcgtagcgaaactggcaggcggcgttgcagttatcaaagtgggtgctgctaccgaagttgaaatgaaagagaaaaaagcacgcgttgaagatgccctgcacgcgacccgtgctgcggtagaagaaggcgtggttgctggtggtggtgttgcgctgatccgcgtagcgtctaaactggctgacctgcgtggtcagaacgaagaccagaacgtgggtatcaaagttgcactgcgtgcaatggaagctccgctgcgtcagatcgtattgaactgcggcgaagaaccgtctgttgttgctaacaccgttaaaggcggcgacggcaactacggttacaacgcagcaaccgaagaatacggcaacatgatcgacatgggtatcctggatccaaccaaagtaactcgttctgctctgcagtacgcagcttctgtggctggcctgatgatcaccaccgaatgcatggttaccgacctgccgaaaaacgatgcagctgacttaggcgctgctggcggtatgggcggcatgggtggcatgggcggcatgatgtaattgccctgcacctcgcagaaataaacaaacccccgggcagaaatgtctgggggtttttcttttggtcatctttctagtataagattcagacacggacgacgcgagtggcgtccagctcattgattatggggaataacatgcacgtaaaatacttagcagggattgtcggtgccgcgctactgatggcgggttgtagctccagcaacgaattgagtgctgccggtcagagtgtacgcattgtggacgagcagccaggcgcagagtgccagctgattggtactgcgacaggtaagcaaagcaactggctttccgggcaacacggagaagaaggcggttctatgcgcggcgcagcaaacgatctgcgcaaccaggcggctgcaatgggcggtaacgtgatttatggcatcagtagcccgagccagggaatgttgtccagttttgtcccgacggatagccagattatcggtcaggtttataagtgcccgaactgatgtgatccagaggctgggtgacaaacgtataattgcctgatgcgcttcgcttatcaggcctacataaggcattgcaactgattgaatgcttgagaatttgtaggccggataaggcgtttacgccgcatccggcatgaccaacgatcacgttatcagtcatttcaggctggatggctccagcctcgcattagcaaagatgagattatttcgcctgtggtgcagttttgctggtggattgaacacgtaagtgatgcagcgcgcgtaagcattgatcctgggttagcggttgggcgttattcgccgctacggtgcgaacatagacctgacatggcacacccgcgagttttttcagtcgtgggctgaaatcaagcattcggcgagtgatcgcttctatttctttacccggcgttgcttcacgcgttttcaccactgcgccgctaaattgttctttgccactttcatctttaaagcggtaaagcaccgccagataatggtcgaacaagttatgtttccattccggttgggaataggtgtcatattccagattgccattgtcctggcagtcaacgtcgtataacggcaggaaatctaacagactggtaatacgtaatgccagttcacgcatttccgcattattaattgcatgaatgattgctcgcgccagcatttcaatctgcaactcattgacgactaactcacatttgctaccgtcatgtagcgttaatacgaaggtaagattttcgccttgattatcggtaagttccagcgtgttaacccgacgattaatatcggcatttttaagctcatcaaccagaatttctgggatgttttctgccattttcttaatgactttatcgcgagcttgctcatactgaaggtgtgcagcagcatccagtttatgcttttgatgcagacgactttccagcgcaatcagcaggtcgcgcagttccatgacagacataaagaacaagctttctttattgcgaggttctttaattttcagcgccagtgcaatgaaattattactcttgcgaataacaccggtattaacacccttgatgcttatggccatgtaggttctccctaaccatttctcaattaaataattaattttaatttataagccagataaatgggcttggtagtaatagttgttaaaataacataaatagccgtactcactctatataaacagaaaagaaaggttaattattggtgttagctatataaaaagtaacaacagcaatgcatatgaataattaaaggttatgcaacgggcaaagattaaacttcccagtttaatgacaggttgctgtacttgcgtttgttgctcttgccggatgcagcgtaaacgccttatccggcctacagttcattgcaaatccattcaatttcaatgcacgatgtaggcctgataagcgtagcgaatcaggcaattttaatgtttaacttccctgtttaatcagttactgctggcgtagctggagatccagcggcgttttgctgggttcgccgccaatttctcgcgccagtttcggcaccagatatccgctcaccagtgtcagcaactcacgcataatctgccgtgcttcgtcatcactcaccataaaatgcgccgcgccctgtactttatcgagcacatgcaggtaatacggcattacgccggcatcgaacaacgcattactcaggtttgccagcgtttgtgcgttatcgttcacatcacgtaacagaacgctctggttcagcaaagtaacgcctacccggcgcaacttagccatcgcctgacggaatgtttcatctacctcattggcatggttgatgtgattcaccagcaagatttgcagcgtagaacgggcaaagcattcaaccagcgcctcggtgatacgtgccgggatcacaatcggcagacggctgtgaatccgcagacgttttatatgcgggatggcttccagttgtgtgagcaaccagtccagctcgtgatctttcgccatcagcggatcgccgccggagaaaatcatctcgtccagttccggatgcgcagcaacatactcaagtgcagtttgccagttacgcttgttgccctgattttcggcataggggaagtgacgacggaagcaatagcggcaatttaccgcgcagccgcctttgaccagcaaaagcgcccggttgtggtatttatgcaacaaaccaggcactacgctgtgctgttcttccagtgggtcggtggagaatccgggcgcgatgacaaactcatcttggctggtaagtacctgacgcaaaagaggatcgtccggattgcctttctccatgcgatcgataaaactgcggggcacacgcagggcaaaaagctttttggcgctgcgtccggctaacagtttttcctccgcgtctatattcaaaagacgcagaagttcatcaggatcggtcacaacatcggcaagttgcgttaaccaatcttctctggatggggtatttagggttacaatatgcgccattttgtggcttagctaccaattaacaaatttcagagggccttatggcaacgtactatagcaacgattttcgtgctggtcttaaaatcatgttagacggcgaaccttacgcggttgaagcgagtgaattcgtaaaaccgggtaaaggccaggcatttgctcgcgttaaactgcgtcgtctgctgaccggtactcgcgtagaaaaaaccttcaaatctactgattccgctgaaggcgctgatgttgtcgatatgaacctgacttacctgtacaacgacggtgagttctggcacttcatgaacaacgaaactttcgagcagctgtctgctgatgcaaaagcaattggtgacaacgctaaatggctgctggatcaggcagagtgtatcgtaactctgtggaatggtcagccgatctccgttactccgccgaacttcgttgaactggaaatcgttgataccgatccgggcctgaaaggtgataccgcaggtactggtggcaaaccggctaccctgtctactggcgctgtggttaaagttccgctgtttgtacaaatcggcgaagtcatcaaagtggatacccgctctggtgaatacgtctctcgcgtgaagtaatgcggttgtggtgcggcctgcaggctgcaccatcacttattcaggtcagagatgatgaaacgccttatcgttcttgttttgcttgccagcacgctgctcacgggctgtaacaccgctcgcggtttcggcgaagacatcaaacatctcggcaactccatctctcgcgctgccagctaatttttcttctcttccgaaaaatcatcagattcccatcatttttggcgatgttgtctattattaatttgctataggcaaacataaataacattacctaaaaggaagacgttatggtgaagaagacaattgcagcgatcttttctgttctggtgcttagtacagtattaactgcctgcaacaccacgcgtggcgttggtgaagacatttctgatggcggtaacgcgatttctggcgcagcaacgaaagcgcagcaataagcaataacggtacgacagctgtgtcgtgccgtttgttttttctgcgatagtcacaaaggtaatagttgaaattcccctgccacctggcaaaatatccgttcaaccatcagctttgcaggacgacctgcaaacgcctcttttcaccggggacggccccaattctccggagcctgatatgtcctggattatcttagttattgctggtctgctggaagtggtatgggccgttggcctgaaatatacccacggctttagtcgtttgacgccgagtgttattactgtgacggcgatgattgtcagtatggcgctacttgcctgggcgatgaaaagcttaccagtagggacggcttatgccgtgtggacgggtattggcgcagtcggcgcggccataaccggcattgtgctgctcggtgagtccgctaacccgatgcgcctggcgagtctggcgttaatcgtattggggattattggtctgaaactcagcactcattaactaccaggctgctgtacccaaataaatttactgacatcaaacccttcccgggtcgcgactgccagcatctcctgtttcacttcgtcagaaatggttggcgtgcgggagagtatccacaggtagtcgcggtccgggccgcaaaccagcgcatggcggtattcccgatcgagtgcaataacgttataaccgccatagaaaggaccaaagaaactcactttcagcgcagcgcgagttggtgcgccggtaaagtacgctttcccttcactctgctgccacattcctctgtcagggttatagcctttattaatgacattcaggccgccgtcatcacgcaggctgtatgttgcggtgactttttccagtccacgttcaaagcggtgatcaaaacgggcaatctcataccaggtaccgagataacgtttggcgtcgaaattatttactacggtcacgccacgcggcggcgtaggagaactgcaggcaacgaccagaaatgcagctgtcgctgcggcaacgagagggagcaggcgcataaatgtttccttactggtttttttctaagtgtagatgacagcaaggaaaagcggagaaaaggtccgaaaattcggacccgatggaattttactgtagagcgttaagaatctgccaggcggcgtcgactctcgctggattgggatagtttttgtttgccagcatcacgatacccagctctttttctggaataaacgcgacatagctaccaaatccgccggtcgcccctgttttatgtacccaacttgcgcgtactgcaggagttgggggcgtaatcgcttttacggggcgtgctgccagtgcaattttattgtcactgccgttaatgatgctgtcaggatttaccggccagtccagcatttcccagcccaggccctgatacatatcgccggtttgccagtagcgagattgtgccagttgtatcccttgttgaagcgttttctcattgatatcaaggggttttaaattgctttgcacccagcgggccatatcttcaatggtgctcttcacaccataagcttcagcatctaacgccccagggctaacatgcactgccttaccttcgcgatatccccaggcgtaattcttttcttctgcgggcggtacattaatccacgtatggttgagtttgagtggctggaagacacgagtttgcatcgcctgctcaaaactcaaaccagacggcttcacagccagtgcgccgaacaaaccgatactggagttggcatacagacgttgtgttcctggagcccatgcaggctgccagttttgatagaagcgcagcaagtcgctactggatttcacctcatccggcacctgcaatggcaggccgccagcagtgtaggttgcgagatgtaatagtgtgatcccattccactgtttagcggtaagttcaggccagtattttgttgtgggatcgcttaacttgatttcccctcgagcaatagcgtcgccaccaagcacgccagtaaatgttttgctgacgctacctaactcaaacaacgtttgctgtgtgacgggctgctttttggcgatgtccgcatagccccaggtaaagtaataaggtttaccctgataaattaccgccaccgccatacccgggatcttttgttgctctataagcggggtaattgtgcgatgcacaatatcgttgatttgttgaggggcagcaaatgtggagcaagaggcggtaattaataaggcgcagagcgtcgttttgaacatagggtctggtttccatacaaaacggcccgccataggcgggccggatttacattggcgatgcgttagattgtaacgacaccaatcagcgtgacaactgtcaggatagcagccagaccgtagaaaacccatttgcccgcaggtacgtggattttcagatcgtgcatcgcgtggtgcatacggtgtaaaccacaccacagcggcagaacgatcatcaggaacaggaatacgcgaccaatgaagctctgcgcgaacgccagaacgcgctcgtagctcagcgcatcacccggaaacaaccccagtggcagcagaatacccaccagcaggatcatcaccggcgcaatgatggcgctccacataccaccggccccgaagaggccccagaataccggttcgtcagaacgctttggatttggattaatcatctcaggctccttaccagtacagggcaacaaacaggattacgatggtggcaaccacagttaccgcccagagacttttgataattggctctggtcccattttttcgtcttttacaatgatattggccgctttcggtgccagttcaaaccaggttttggtgtgcagcagagctgccgccagagtgatcaggttaatgatcacgataaccgggttttgtaaaaagtcgacgaatcccgcccaggcttccgggccatttttcagggcaaacagcccgaaaatcagttcaatgctgaaccacacagccggaaccgccgtgccttcgcgcagcatgtaaaagcgataaaacggcaattttttccaccaggtggacgtcattggccgtacatacggtttacgtttagtcgtcatgttgcactccttagcgtggtttcagggtcgcgataagaaagtctttgctactttctactttgccctgctgaatggccgcagccggatcgacgtgtttcgggcagacttcggagcagtagcccacgaaagtacagctccatacgccgttctggctgttcaactgcgccatacgctccttcttaccgtggtcgcggctatcttcgttataacgatgcgccagcgtaatggcagccggaccgatgaactctgggttcaggccaaactgcgggcacgcggcgtagcacaaaccacagttgatgcaaccggagaactggtgatacttcgccatctgcgccggggtctggatgttagtaccctgatccgcggtgcgggagttgccgatgatgtacggtttgatcgcttccagactttcgatgaagtgggtcatatcgaccaccagatcgcgttcaatcgggaagttagctaacgcttcaaccttcataccgtcggtgtaatcacgcaggaaggttttacatgccagttttggcacgttgttaaccatcatgccgcaggaaccacaaatcgccatacggcaggaccagcggtagctcaggtccggtgccaggttgtctttgatgtagcccagcgcatccagtaaactggtagttgcgtcataaggcacttcatagaatgcgctatgcggtgcggtatcgacttccgggttatagcgcaccacctcaattttcaggtttttcatctcagccattcgccttctccttcttattggctgcttccgccttatcggctgcatccgcttcgccaccgtaaacgcgtttagctggcggcagcgtagtaatcttcacgtcgctgtactccaggcgagtcgtgccatcagcatcgcggaaggcgagggtgtgtttgaggaagttgacgtcgtcacgctcggtgcaaccttcgtccagacgctggtgcgcgccgcgggactctttacgtgccattgcggagtgcgccatacattcagcaacgttcagaccgtggcccagttcaatggtgtagagcaggtcggtgttgaacacgctggaagtgtcggtgatgcgcacgcgcttgaagcgttcctgcagctctgccagcttgtcgatggttttctgcatcagttccggcgtacggtagataccgcagccttcttccatagccaggcccatttcgtcgcggatcttcgcccagttttcgccgccatcctggttaaccagatctttcagacgttgttcaacgccagctgcctgcgcttcaattgccgcttcgttgccattaccggcagttgctgcacgctctgtcgcttgttcaccggccagacggccgaagaccaccagttccgccagggagttagaacccagacggtttgcaccgtgcagaccaacagaggaacattcacccacggcgaacagacctttaatgcgggtttcacagttctgatcggtttcgataccgcccatggtgtagtgtgcggtcggacgtaccggaatcggttctttaaccggatcgacgccaacgtacgctttcgccagttcgcagatgaacggcagacgttcatgcagttttttctcgccgaggtgacgcaagtcgagataaaccacatcgccacgcggcgtggagatggtgttgcctttacgccattcgtgccagaaggcctgagagactttgtcgcgtggacccagttccatatatttgtttttcggctcgcccagcggagtttccgggcccatgccgtaatcttgcagataacggtagccatttttgttgaccagaataccgccttcaccgcggcaaccttcggtcatcaggataccggaacctggcagaccggttgggtgatactgaacgaattccatgtcacgcagcggaacgccgtggcttagcgccatacccataccgtcaccggtaacgatgccgccgttggtgttgtaacgataaacgcgacccgcaccgccagtagccataacgaccgcgttagcacggatctgcaccagcgtgccttccatcatgttcattgctaccaggccgcgaacatgaccatcatcaaccagaatatccagcacgaaatgttcgtcaaaacgctggatctgcgggaattgcagagaggtctggaacagcgtgtgcagcatatggaagccggtcttatcggcggcgaaccaggtgcgctcgattttcatgccgccgaagcgacgtacgttgacgctaccatccgggcgacggctccatgggcatccccacagttccagttgggtcatttcggttgggcagtggtggacgaaataatccacgacatcctgctcacacaaccagtcgccacccgctactgtatcgtgaaagtgatattcgaagctgtcatgatcctgcgcgacagcggcggagcccccttctgcagcaacggtatggctacgcatcgggtatactttactgattagtgcgatttttgcattcggatttgcctgcgcggcagcaattgcagcacgtaatcccgcgccaccggcgcctacaatggcaagatcggcttgaaaggtttgcacgacattcctccagattgtttttatcccacagccacgtacttcagggtaagtacctgaaagttacggtctgcgaacgctattccactgctcctttataggtacaacagtatagtctgatggataagtctgaaatttgacgagatcgatttttttagtgcgcaagagggctaaattatcactgaagatgattaatttaattactaaaccatcagatcgtgctttttttagtcactgcccaccgctgtttgattcctgcgtaaaatttgtctcgccgtcgcgttgcgagtagacttcgtgcccttgtcaaaaactggagatttaactatgagcgaaacggcatcctggcagccgagcgcatccattcctaacttattaaaacgcgcggcgattatggcggagatccgtcgtttctttgccgatcgtggagtgctggaggtggagacgccttgtatgagccaggcgacggtaaccgatattcatttggtcccgtttgagacacgtttcgttggccccgggcatagccaggggatgaatctctggttaatgaccagcccggaataccatatgaaacgcctgctggttgccggttgtgggccggtattccagctgtgccgcagcttccgtaatgaagagatggggcgttatcacaaccctgagttcactatgctggagtggtatcgaccgcactatgatatgtaccggttgatgaacgaggtggacgatctcttacaacaggtgctggactgcccggcagcagaaagcctttcttatcaacaagctttcttgcgttatctggaaattgacccgctctctgccgacaaaacgcaactgcgggaagtcgcagcgaaactggatttgagcaatgttgctgataccgaagaagaccgcgacacgctgctacaattgctgtttacctttggcgtagagccaaatattggcaaagaaaaaccgacctttgtgtaccactttccagccagccaggcaagtctggcgcaaatcagtaccgaagatcatcgggtcgctgaacgctttgaggtttattataaaggtattgagctggcgaatggtttccatgaattgacggatgcccgtgagcagcaacaacgctttgaacaagataaccgtaagcgcgcggcgcgcggtttgccgcagcaccccattgaccagaatctgattgaagccttgaaagtcggtatgcctgactgttccggcgtggcattaggtgttgatcgtctggtgatgttggcgctgggcgcggagacactggctgaagtcatcgcctttagcgttgaccgggcataattctgaaaaattactgaattaacagcgaagaatggcgtgataagcgccattctgtagcatatgttttcatttttccgttaaaggccacaatttaagactggatatttgatatcatccaggtatcaattctgtattggtttttacgctgcctgctcaatgttgcgcagtgcagttcagtgggcacgtgttatacacgcgctgaaatgaaggatggtttcatgcctcacacgataaaaaagatgagtctgataggactcatattgatgatctttacttccgtatttggatttgccaatagcccaagcgcttattacttaatgggttatagtgcgattcccttttatatattttctgcattgttattctttattccattcgccttaatgatggctgaaatgggagctgcttatcgcaaagaagaaggcggtatctattcctggatgaataatagtgtcggaccacgttttgccttcattggtacgtttatgtggttttcctcttatatcatctggatggtgagtacctccgcgaaagtttgggtaccgttcagtacattcctctatggtagcgacatgacccagcactggcgtattgccggactggagcctacgcaggtggttggtctgctggctgtggcatggatgattctggtcaccgtcgttgcttctaaggggattaataaaattgcccgcattactgcggtgggcggtattgcagtaatgtgtctgaatttagtattgctgttagtaagcattactattttgttattaaatggtgggcatttcgcgcaggatattaatttccttgcaagtccgaacccgggttatcagtccggtctggcaatgctaagctttgtggtatttgccatttttgcctatggcggaattgaagcggttggtggtctggtcgataaaacggaaaatccagaaaagaactttgccaaaggtattgtttttgccgctattgttattagtatcggttatagcctggcaatatttttatggggcgtcagcacaaactggcagcaggtattaagtaatggttccgttaacctcggcaatattacctatgtgctgatgaagagccttgggatgacgctgggtaatgcactgcatttgagtcctgaagcgagtttgagcctgggcgtatggtttgcgcgtattactggacttagcatgttcctcgcctataccggtgcgttctttacgctttgctatagtccgttgaaagccatcatccaggggacgccgaaagcattgtggccggaaccgatgacgcgcctgaatgcgatggggatgccgtctatcgccatgtggatgcagtgcgggttggttactgtcttcatcctgctggttagctttggtggcggtaccgcaagcgcgttctttaacaagctgacgctgatggcgaacgtgtctatgacgcttccttacctgttcctcgcgctggctttcccgttctttaaagcacgtcaggatctcgacagaccgtttgtgattttcaaaacgcatttgagcgcaatgattgcgacagtggttgtcgtactggtggtgacatttgcgaacgtcttcaccatcattcaacctgtggttgaagccggagactgggacagcacattgtggatgattggcggccctgtcttcttcagcctgttagcgatggcgatttaccagaactattgcagcagagtggcaaaaaatccgcagtgggcggtggaataacccgatgccctatcgtctacctgacgatagggcgtaaagacaggaaatgttatggatgacaccagccgggacccggcaataaccgaagatgaaatcagggcgctgcaattttctgccggggatgtagcggaaatagagcagacgattctctcttttgtcgatgcctgccacacccgtaaagtggcgatggtggtgggtagcaccattaacaccctcaaagatcgcgatggtaaacggtggggaaacctgccggatatttattgcgcttatcttatccgatgtctggtttttcgcggggaattagtgggatacggcgatttgtttcgtatgcgctatagcgaaattaagcgaccggttaccttatgagtgcgcgcatgtttgtcttatgctgcatctggtttattgtggcgttcctctggataaccatcacttccgcgctggacaaagagtggatgattgatggacgcgggattaacaacgtctgcgatgtgttgatgtatctcgaagaagacgatacccgtgatgttggtgtgataatgacgttaccgctctttttcccttttctctggttcgctttgtggcgaaaaaaacgcggctggtttatgtacgccaccgcgctggctattttcggctactggctgtggcagttttttctgcgctatcagttttgtttgtgagccggattggttcatccggcacacaaacttacaaacttcccgcctgacgacctttgcccgcagacgtcagcgttctccccgtttgtttaccgttgaggctttccagacgcatctggaagggcgggaatggcatatcgataccgtgggcatggaagccagccagaatcagctggtggatctcatggcgtagcggcatacggtgacccatctcagcggcgtaaatacgcagctcgaaaatctgaatcccctgttgcagatccaccaggaagacttccggtgccgggttgtcgatcaccaggctgcagcgacgcgctgcggtgagcaggatttccgtcacttcttcgctattggcatcggcaggggccggtatcgtcaacaccacgcgcgtgacgctgtcagagaggctccagttgataaactgctcggtaataaacgccttgttcggcacgattatctctttacggtcccagtcgctgatggtggtggcgcgggtgttaattttcgtcacgctaccggtgagatcgcgaattgtcaccgtatcgccaatgcgaatcggtttttcgaacaggataatcagaccagagataaagttggcgaaaatttcctgcaaaccaaaaccgagaccaacaccgagcgcggcaaccagccactgcaatttgctccactcaataccaatcatactgaagccgaccagcccgccaatcagcatcagcagatatttggtgatggtggtgatggcgtaacccgtacccggcgttaaatccaggtgctgcaaaatcgccagttccagcagcgcgggcaagttgcgcaccagctgcgtggtgatgataaacaccagaatggcaatcagcaccgcaccgagggtaattggctccagactttctacgccctgtaccgtggaggtgacatcccacaggctaatattttcgaggaagccgaaagcggaatggatttcactccacagcacaatgacagaaagcagggcgatcaacatcaaaatactgcgcaccagccgcaaggattgcgcactgatggcatcgagatcgacttcgctttcatcgacttcaattgctccttccgggctactgtgatgatgcgcttcctcttcgccacgcgcacgttgcgctaacatctctgcccggcgatgcttcgcccgatcaaacgccagcctgcggcgctggatcagcatccagcggcggataacgtgataaaccaccagtagcaggaaccagatggcaacgctggtttcaagcctcgctaacagcgcctgtgccgttgccagataacccaccgcgctcgccagaatggcaaccaacggcgcgccaatcatcatgttccacagcatatggttggtaatgttgtcgccgctgccctctttgttgagatacagcggaatcccggcctttttcaggctgagggtgaccaccgccagcgcaccgcaaatgaggataaagcaaagccgtcccaggctaccggagaattcacggtcgtcgaggttatcgaacatcatcagcgccataatcagcggcacaataagcccgatgctcatcaggtagtagcgcatcccacgggaaacacgttcgcgcggccagccaaaatgagcgataaacaagccgttcgggcgggcaaaggtggcgcaaatcatcactacccacagcagcggcacggtggccgttacaccatcgccaatcgcgaccgccagcggataaggccacgcctcgcgcaagccgtaacccagcgtcatccacagcaccggtaacggactcgcgacgagaatgctccagaaaagagtgcgcaacgtcagccagaagtgatcctgagtcactttgccaactttcgccgcgctacgttcaagaaaacgggtgaaatagcggcggctgtaaatactgcaaccgaccagaatcaacgcgccaaacagcggcaaaattgtctctttgctggtcagcatcatcacactggctttgcccaactgactgaaggtgtccaggctaatgagacgacgcagatcctgggcgatttccagcggccaggcgatggtcatcgggcgcacgtcagaggtccagaacagatagcggtgcgttgcttcgttcacctctttcagcgcatcctccagttgcccgttggagactttcagcttggtcagttccaatagtagcgtgtcgccaccctgcaacaaactgttcagcaactcacgctgagtgcgcagttgtgcttccagaatacggttttgctcggcagtcagcggctgaccgtcggcctgatgaatttgccgtagcagcggctgtttattaagcagatcctcataacgtaaccgttgcacacgcaactgcgccatttcggtatcaagctgttgtggtttcggcatttccggcagccgtgccacctgcgcccgcagcgcttcgccgagcagattggagcttcccagccattggctctgttcacgcagcgtattcaacgcctgccggacctgtaacgtctggctggcagcctgacgctgttggctggcaacgagatccatccgctgcgcctgttgattcaaagccgcgcttagttcgcggttaattttgaattgcgcgacgatatctttcggcaaatcggcgctgttttctgccagcaattcggtactttccagcgcccgctccgcctcaagctgacgttggctgtttaattgattacgcaaggcctgcaaatacgcatccagttgctggctctctttttccgccagctcactgcgtaagcgcgctaattcctggcggttattggcagacagctgcgccagctccagttcatcaacgagcgccttaagacgtgcagagtcagactgcaacgcgaaattttgtgcctgattgagcggagtattgccggtaagcgttcccaggcggcgctcgatctcatttaactgacggcgggcgtcggtttgctgttgcggcagttgattcaggctatcggcaatctcgcgggcgcgctcctgctcttgctgggcctgacggcttttatccagcaactggctgctgacctggagaatttcctgattcagcgcgtcggtagacattcccgggctcacgctgcgcggctcgtcacgcatgttgtttaattgtgcgcgcagagtagcggagagtttcggataattatcgataacttgctgatattgtttgatgcgctcaagggaaccttttcgttcctcaagcgcatttaaggcagactggagcgcctctacgacttccggctgtgcgggtttcgccgcttttgcctgctccagttcctgagtgatttgtttgctatcgggggccgtcgcggcgtacgccccccaactgaggcaccaggccatcagaaaagtgataatcaggcgcacgtcagcgtttcctttgatggattagacctggtcttttttgtcgtcaaccaatgggctggcgtcgtgttctgcttcgatctcttcagcaggaagcggggcaggttcagcgtctggcgtaacaaaggtttcggtagatactgccagcggctggccaattttcgtgacagacaggctttccagttgctcaaccagattcactttacccggtgcaaacaggttgataacggtggaaccgagtttaaagcgacccatttcctggcctttcagcagtgccacagaaccgtcgttttccccggcaggccaggtccagcgcttgatgataccttcgcgcggcggcgtaatggtgcccgcccagaccgtctcaatgctgccaacaatcgtcgctccgaccagaatctgcgccattgggccaaattcggtatcgaaaaggcaaatcacgcgttcgttacgggcaaacagattcggcacgttctgagccgtgagatggttaacggagaagagatcgcccggcacgtagatcatctcacgcagaataccgttgcacggcatgtgtacgcggtggtagtcacgcggggagaggtaagtggtcacaaacgtaccgttgcggaacaggtccgccatcagatagttgcctgccagcagggcttcgaggctgtagttgtggcctttggcttgcaggattttatcttcttcgattttacccaactggctgataacgccatcggcaggcatgaccagtacattcggatcggtatcgattgggcgtacttcgtcacgcagcggacggacaaagaattcgttaaaggtgcggtagctggcggtgtccggcttttgcgcctctttcatgtcgaccttgtagtatttaacgaacagatcgataaccagttttgtcagccatcctgcccgcttgcttgcgccccaacccgccaggcgagtaagccatagtttcggcagaatgtactgtaggctaagtttaaaactatttaacaaggtagcctccaggccattgttttgtcgttcctgatccggcctacatgccggatcctgaaaaaaaggggacgattctaacgacggttagcttaattgtcagtcatccgtatcagaaaagtttttacgcgtttttacctgcgccatgctttccagaatacggtgatagttttcgaaacgggtttccgcgattttcccttcctcaaccgcttcccggatagcgcagcccggatcggtatcgtgtttgcaatcgcgatatttacacagacctaaatagtcatggaattcgacaaagccctgagtgatttgttccggctccaggtgccagaggccgaactcacgcactcctggggagtcaatcacatcaccgccgtgcgggaagtgatacagccgagcggcggtcgtggtgtgctgaccgagcccgctgttgtcagagatatcgttggtcaggatctctttttgcagccccagcaacgcattcagcaggctggatttgccgacgccagactgcccggcaaaaatgctgatgcgcccggtcaacgcctcttccagcggttttagcccatcctgagtatggctggaaaccatcaatacgcgataaccgatattgcggtagatatccatctgctcgttgacgaacgccatgccttcgtcgtccagcaggtctatcttgttgagcacaataatcggctcaatctgcaaggtttcgcaggccaccaggtaacggtcgataatattgaggctcagctccggcaaaatggcggagacaatgacaatctggtcgatgttggcggcaataggttttacgccgtcgtagaaatccggacgcgtcaacacgctggtacgctcatgcaccgcttccacgatccctttgacatttacgccttccgccgccggtttacccggacgccagactacgcggtcgccggttaccaggctacggatggtacggcgaatattgcagcggtgaacgtcgccatcggcggattccacatcagcgtgcataccaaagcggctgatgacgataccttcatcaggctcgccaaacagattgtcgtcgtagtcgggcttctccttagacgttttaagacgacgctggtgattggcgttcacgcggcgctgctggcctttggagagtttatttttactcaatcgtacagactcctggtcgcccctgatgggcaaaacatctatgatacacgcaattgtggatcaatatagtcactgtgaatgggtggaaaatagcatgagtgccaatgaaaacaacctgatttggatcgatcttgagatgaccggtctggatcccgagcgcgatcgcattattgagattgccacgctggtgaccgatgccaacctgaatattctggcagaagggccgaccattgcagtacaccagtctgatgaacagctggcgctgatggatgactggaacgtgcgcacccataccgccagcgggctggtagagcgcgtgaaagcgagcacgatgggcgatcgggaagctgaactggcaacgctcgaatttttaaaacagtgggtgcctgcgggaaaaagcccgatttgcggtaacagcatcggtcaggaccgtcgtttcctgtttaaatacatgccggagctggaagcctacttccactaccgttatctcgatgtcagcaccctgaaagagctggcgcgccgctggaagccggaaattctggatggttttaccaagcaggggacgcatcaggcgatggatgatatccgtgaaagcgtggcggagctggcttactaccgcgagcattttatcaagctgtaaaatttttcctggtcacgtaagcgccggaatccacttgcggcggcgtgattttgacgctaaattgaacgtcttgctgataatttcagcacttgagataaaaacgcaaaaaaaacttttttggggggttgcagagggaaagatttctcgtataatgcgcctcccgtaacgacgcagaaatgcgaaaattacgaaagcaaaattaagtagtacgcgggaatagctcagttggtagagcacgaccttgccaaggtcggggtcgcgagttcgagtctcgtttcccgctccaaaatttgaaaagtgctgcaaagcacagaccacccaagcgggaatagctcagttggtagagcacgaccttgccaaggtcggggtcgcgagttcgagtctcgtttcccgctccaaaatttgaaagtgctgtaaggcacagaccacccaagcgggaatagctcagttggtagagcacgaccttgccaaggtcggggtcgcgagttcgagtctcgtttcccgctccaaattcttctctcaataaaatatccacagcgacgcgatgcgttattgctggtttttgttgtctctgacaaactcttgtaaacagagttatccacagcctcaggctgtaatcttaatttcaaagaaacttcgcacggtgaatagtatttttttaacctattgatagataagttaaaaattaagattccgttttgtcgagtcgatcacttgacgattttattcgtcttgaattgcaatgcgtttttatttttattcacaagctgtggatgaatcaggcgtcacgcggtaaccctttttcaatcacccgaaccagacgctgttttttcggcaattgcacttcgactatgcacgcatttcgtctctctatttgctgcgcaatcgcccacgctatgtgctcatcgagaagtgggtgctcacctttacgactttccagcgctgtcaaaatcgtttcatcccaaggggcattgcctaatgctacggcgatattacgcagccaacgcaggtgaccaatacgacgaatcgcgcttccttccgtgacttttaaaaacttctcttcgctccaggcgaataactcaatgagttccggtgcgtgtagcggcttacgcgggctgaaatcctcttctgtggtgagttgactatagcgattccacgggcagataagctggcagtcatcgcaaccgtaaatacggtttcccattaacggtcgcaactcttccgggatcgccccttcaagttcgatggtgagataagagatacagcggcgagcatcgacggtatatggctcgacgatggcaccggtcgggcaaatcgtcatacaggccacgcatttgccgcatccttcctcgactggttgatccacgggcagcggaatatcgaccagcaattcgcctaaaaagaagaagctaccggcctcgcgattgaggataagactgtgcttacctgtccagccgagcccagctttttcagctaacgggcgctcgagaataggcgcagaatcgacaaacggtctaaaattcaggctaacacaatgttgctgaatcatctcgcccagctttttgagtcggttgcgcagaagtttgtgatagtcacggcccagcgcataacggctaacatagccgagtttggggtttttcagcgtgctggcaaatgcggcgttagcaggaaggtaattcatccgcacgctgatcacgcgcagcgtaccgggcaataactcatgagggcgagcgcgcagcataccgtgacgtgccatccagtccatttcgccgtggtattgtttgtccagccatgcttgcagtttgggctcggactcgctgagatcggtatcggtaatacctacctgctgaaagcccagttccagcccccactgtttaattttttgcgctaactgattgagatcgaggggctcactcatgacggaccatacaatgaagaaaaaccccgtaagtataccacacaccgtctggtacgccgacgatatccgccgcggagaacgcgaggcggcagatgtgctggggctcacactctatgagctgatgcttcgcgctggcgaggccgcattccaggtgtgtcgtagcgcgtatcctgacgcccgccactggctggtgctgtgcggtcatggtaataacggcggcgatggctacgtggtcgcgcgactggccaaagcggtcggcattgaggtcacgttgttggcccaggagagcgacaaaccgttgccggaagaggccgcgctggcacgcgaagcatggttaaacgcgggtggcgagatccatgctagcaatattgtctggcccgaaagcgtagatctgattgttgatgcgctgctcggtaccggtttgcggcaagcgccccgcgaatccattagccagttaatcgaccacgctaattcccatcctgcgccgattgtggcggttgatatcccttccggcctgctggctgaaactggcgctacgccaggcgcggtgatcaacgccgatcacaccatcacttttattgcgctgaaaccaggcttgctcactggaaaagcgcgggatgttaccggacaactgcattttgacagtctggggctggatagttggctggcaggtcaggagacgaaaattcagcggtttagtgcagaacaactttctcactggctaaaaccgcgtcgcccgactagccataaaggcgatcacgggcggctggtaattatcggtggcgatcacggcacggcgggggctattcgtatgacgggggaagcggcgctgcgtgctggtgctggtttagtccgagtactgacccgcagtgaaaacattgcgccgctgctgactgcacgaccggaattgatggtgcatgaactgacgatggactctcttaccgaaagcctggaatgggccgatgtggtggtgattggtcccggtctgggccagcaagagtgggggaaaaaagcactgcaaaaagttgagaattttcgcaaaccgatgttgtgggatgccgatgcattgaacctgctggcaatcaatcccgataagcgtcacaatcgcgtgatcacgccgcatcctggcgaggccgcacggttgttaggctgttccgtcgctgaaattgaaagtgaccgcttacattgcgccaaacgtctggtacaacgttatggcggcgtagcggtgctgaaaggtgccggaaccgtggtcgccgcccatcctgacgctttaggcattattgatgccggaaatgcaggcatggcgagcggcggcatgggcgatgtgctctctggtattattggcgcattgcttgggcaaaaactgagcccgtatgatgcagcctgtgcaggctgtgtcgcgcacggtgcggcagctgacgtactggcggcgcgttttggaacgcgcgggatgctggcaaccgatctcttttccacgctacagcgtattgttaacccggaagtgactgataaaaaccatgatgaaagcagtaattccgctccctgaataaggaagtgactgataaaaaccatgatgaatcgagtaattccgctccctgatgagcaggcaacattagacctgggcgagcgggtagcgaaagcctgcgatggcgcaaccgtaatctatctgtatggcgatttaggcgcaggtaaaaccacctttagccggggctttttacaggctctgggtcatcagggtaatgtcaaaagccccacttatacgctggtcgaaccctatacgctcgacaacttaatggtctatcactttgatttgtaccgccttgccgatcccgaggagctggagtttatggggatccgcgattattttgccaacgatgccatctgcctggtggagtggccacaacaaggtacaggtgttcttcctgacccggatgtcgaaatacacattgattatcaggcacaaggccgtgaggcgcgcgtgagtgcggtttcctctgcgggtgaattgttgctggcgcgtttagccggttaacctttgaaaggtggcgggatgatgtatcgcatcagaaattggttggtagcgacgctgctgctgctgtgcacgccggtgggtgccgcgacgctctctgatattcaggtttctaacggtaatcaacaggcgcggataacgttgagttttattggcgatcctgattatgcgtttagccatcaaagcaaacgcaccgtggcgctcgatatcaaacaaacgggcgtgattcagggactgccgttgttgttcagcggcaataatctggtgaaggcgattcgctctggaacgcctaaagatgcacaaacgctacggctggtggtcgatcttaccgaaaacggtaaaaccgaagcggtgaagcggcagaatggcagcaattacactgtcgtctttacgattaacgccgatgtgccgccaccgcctcctccgccgcccgtggttgcgaaacgcgttgaaacgcctgcggttgtcgcaccgcgcgtcagcgaaccggcgcgcaatccgtttaaaacggaaagtaaccgcactacgggtgttatcagcagtaatacggtaacgcgtccggcagcgcgcgcgacggctaacactggcgataaaattatcatcgctattgatgccggacacggcggtcaggaccctggcgctatcggccccggtggtacgcgggagaaaaatgtcaccatcgccatcgcgcgtaaattgcgtactttgctcaatgacgatccgatgtttaaaggcgttttaacccgtgacggggattactttatcagcgtgatggggcgcagtgatgtggcacgtaagcaaaacgccaatttcctcgtgagcattcacgctgatgccgcaccgaaccgcagtgcgactggcgcttccgtatgggtgctctctaaccgtcgcgccaacagtgaaatggccagctggctggagcagcacgagaaacagagcgagctgctgggtggggcgggtgatgtgctggcgaacagtcagtctgacccctatttaagccaggcggtgctggatttacagttcggtcattcccagcgggtagggtatgatgtagcgaccagtatgatcagtcagttgcaacgcattggcgaaatacataaacgtcgaccagaacacgccagccttggcgttctgcgcagcccggatatcccaagtgtactggtcgaaaccggttttatcagcaacaacagcgaagaacgtttgctggcgagcgacgattaccaacaacagctggcagaagccatttacaaaggcctgcgcaattacttccttgcgcatccgatgcaatctgcgccgcagggtgcaacggcacaaactgccagtacggtgacgacgccagatcgcacgctgccaaactaaggacgattgatgccaattcaggtcttaccgccacaactggcgaaccagattgccgcaggtgaggtggtcgagcgacctgcgagcgtagtcaaagaactagtggaaaacagcctcgatgcaggtgcgacgcgtatcgatattgatatcgaacgcggtggggcgaaacttatccgcattcgtgataacggctgcggtatcaaaaaagatgagctggcgctggcgctggctcgtcatgccaccagtaaaatcgcctctctggacgatctcgaagccattatcagcctgggctttcgcggtgaggcgctggcgagtatcagtagcgtttcccgcctgacgctcactagtcgcaccgcagaacagcaggaagcctggcaggcctatgccgaagggcgcgatatgaacgtgacggtaaaaccggcggcgcatcctgtggggacgacgctggaggtgctggatctgttctacaacaccccggcgcggcgcaaattcctgcgcaccgagaaaaccgaatttaaccacattgatgagatcatccgccgcattgcgctggcgcgtttcgacgtcacgatcaacctgagccataacggtaaaattgtgcgtcagtaccgcgcagtgccggaaggcgggcaaaaagaacggcgcttaggcgcgatttgcggcaccgcttttcttgaacaagcgctggcgattgaatggcaacacggcgatctcacgctacgcggctgggtggccgatccaaatcacaccacgcccgcactggcagaaattcagtattgctacgtgaacggtcgcatgatgcgcgatcgcctgatcaatcacgcgatccgccaggcctgcgaagacaaactgggggccgatcagcaaccggcatttgtgttgtatctggagatcgacccacatcaggtggacgtcaacgtgcaccccgccaaacacgaagtgcgtttccatcagagccgtctggtgcatgattttatctatcagggcgtgctgagcgtgctacaacagcaactggaaacgccgctaccgctggacgatgaaccccaacctgcaccgcgttccattccggaaaaccgcgtggcggcggggcgcaatcactttgcagaaccggcagctcgtgagccggtagctccgcgctacactcctgcgccagcaagtggcagtcgtccggctgccccctggccgaatgcgcagccaggctaccagaaacagcaaggtgaagtgtatcgccagcttttgcaaacgcccgcgccgatgcaaaaattaaaagcgccggaaccgcaggaacctgcacttgcggcgaacagtcagagttttggtcgggtactgactatcgtccattccgactgtgcgttgctggagcgcgacggcaacattagtcttttatccttgccagtggcagaacgttggctgcgtcaggcacaattgacgccgggtgaagcgcccgtttgcgcccagccgctgctgattccgttgcggctaaaagtttctgccgaagaaaaaagcgcattagaaaaagcgcagtctgccctggcggaattgggtattgatttccagagtgatgcacagcatgtgaccatcagggcagtgcctttacccttacgccaacaaaatttacaaatcttgattcctgaactgataggctacctggcgaagcagtccgtattcgaacctggcaatattgcgcagtggattgcacgaaatctgatgagcgaacatgcgcagtggagtatggcacaggccataaccctgctggcggacgtggaacggttatgtccgcaacttgtgaaaacgccgccgggtggtctgttacaatctgttgatttacatccggcgataaaagccctgaaagatgagtgatatcagtaaggcgagcctgcctaaggcgatttttttgatggggccgacggcctccggtaaaacggcgttagccattgagctgcgtaaaattttaccagtagagttgataagcgttgattctgcccttatttacaaagggatggatatcgggacggcgaagccgaacgctgaagagttactcgccgcgccgcaccgattgctggatattcgcgatccgagccaggcttacagcgctgctgattttcgccgcgatgcgctggcggaaatggccgatatcaccgcggcggggcggatcccactgttagtgggcggtacgatgttgtatttcaaggcattgctggaagggttgagcccgctaccgagcgcagacccggaagtacgggccagaattgagcaacaggcggcagagcaaggttgggagagtttgcatcgtcaacttcaggaggtagatccggttgcggcagcaaggattcatccaaatgatccacaaaggctttcccgggcactggaagtttttttcattagcggtaaaactttaacggaactgacgcaaacgagtggagacgctctaccgtatcaggtgcatcagttcgccatcgccccggcgagccgtgaactgctccatcaacgcattgagcagcgttttcatcagatgttggctagtggttttgaagcagaagtccgggcgctttttgcccgaggagatttgcatacggacttgccttccattcgttgcgtgggttatcgccagatgtggtcttaccttgaaggcgaaatcagttacgatgaaatggtttatcgaggtgtttgcgccacgagacagttggcgaagcggcagataacctggctgcgtggttgggaaggggttcactggcttgacagtgaaaaaccagaacaggcgcgtgacgaagtattacaggttgttggtgctatcgcaggctgaatgtgtacaattgagacgtatcgtgcgcaattttttcagaatcgaaaggttcaaagtacaaataagcatataaggaaaagagagaatggctaaggggcaatctttacaagatccgttcctgaacgcactgcgtcgggaacgtgttccagtttctatttatttggtgaatggtattaagctgcaagggcaaatcgagtcttttgatcagttcgtgatcctgttgaaaaacacggtcagccagatggtttacaagcacgcgatttctactgttgtcccgtctcgcccggtttctcatcacagtaacaacgccggtggcggtaccagcagtaactaccatcatggtagcagcgcgcagaatacttccgcgcaacaggacagcgaagaaaccgaataaggtttcgggctgtttttttacacggggagccagcgatcctgcgttccccgctgatctatttagagggttatacgcttgtttgaccgttatgatgctggtgagcaggcggtactggtacacatctattttacgcaagacaaagatatggaagacctccaggagtttgaatctctggtctcttccgccggtgtcgaagcattgcaggtgattaccggtagccgtaaagcgccgcacccaaagtattttgtaggtgaaggtaaagcagttgaaattgcggaagctgtcaaagcgacgggtgctagcgtcgttctttttgaccatgccctgagcccggcgcaagagcgtaacctggagcgtttgtgcgagtgtcgtgttatcgaccgcaccggccttattttagatattttcgcccaacgtgcgcgtacccatgagggtaagttgcaggttgagctggcgcagctgcgccatctggctacgcgcctggtgcgtggctggacccaccttgaaagacagaaaggcgggataggtttgcgtggtccgggtgaaacccagctcgaaaccgaccgtcgtttgttgcgtaatcgcatcgtgcagatacagagccgcctggaaagagttgaaaagcagcgtgagcaggggcggcaaagccgtatcaaagccgacgttcctactgttagcctggtgggatataccaacgccggtaaatctacccttttcaatcgcatcaccgaagcgcgggtctacgcggcagaccagttgtttgccaccctcgacccgacgttgcggcgtattgacgttgcagatgtcggtgaaaccgtacttgcagataccgtagggtttattcgccacctgccgcacgatctggtggcggcatttaaagccacgttacaagagacgcggcaagccacattactgctgcacgtcattgatgcggcggatgtgcgtgtacaagaaaacatcgaagcggtgaatacggttcttgaagagatcgacgctcacgagatcccaaccctgctggtgatgaacaagatcgatatgctggaagatttcgaaccgcgtattgatcgggacgaagagaacaaaccgaaccgtgtctggctttccgcacagaccggagcggggataccacagctttttcaggctttgacggagcggctttccggcgaggtggcgcagcatacattgcgtctgccaccgcaggaagggcgtctgagaagtcgtttttatcagcttcaggcaatagaaaaagagtggatggaggaggacggcagcgtaagtctgcaagttcgtatgccgatcgttgactggcgtcgcctctgtaaacaagaaccggcgttgatcgattacctgatctaacggcgtagcgtctgaagcgtggagtcatatcctctggcgtcgaaagacaacagggatcaccgcataacaaatatggagcacaaacatggcgtggaatcagcccggtaataacggacaagaccgcgacccgtggggaagcagcaaacctggcggcaactctgagggaaatggaaacaaaggcggtcgcgatcaagggccacctgatttagatgatatcttccgcaaactgagcaaaaagctcggtggtctgggcggcggtaaaggcaccggatctggcggtggcagtagtagccaaggcccgcgcccgcagcttggcggtcgtgtcgttaccatcgcagcggcagcgattgtcattatctgggcggccagtggtttctataccattaaagaagccgaacgcggcgtggtaacacgctttggtaaattcagccatctggttgagccgggtctgaactggaaaccgacgtttatcgacgaagtcaaaccggtgaacgtggaagccgtgcgtgaactggccgcttctggtgtgatgctgacgagcgacgagaacgtagtgcgcgttgagatgaacgtgcagtaccgcgtcaccaatccggaaaaatatctgtatagcgtgaccagcccggatgacagcctgcgtcaggctaccgacagcgccctgcgtggagttatcggtaaatacaccatggaccgcattctgacggaaggtcgtaccgtgattcgtagcgatactcagcgcgaactggaagagacgattcgtccgtatgacatgggtatcacgctgctggacgtcaacttccaggctgctcgtccgccggaagaagtaaaagcggcgtttgacgatgcgattgccgcgcgtgaaaacgaacagcaatacattcgtgaagcagaagcgtataccaacgaagttcagccgcgtgcgaacggtcaggcgcaacgtatcctcgaagaggcgcgtgcgtacaaggcccagaccatcctggaagctcagggtgaagtggcgcgctttgctaaacttctgccggaatataaagccgcgccggaaattactcgcgagcgtctgtatatcgagacgatggaaaaagtgttgggtaacacccgcaaagtgctggttaacgataaaggtggcaacctgatggttctgccgttagaccagatgctgaaaggtggtaacgcccctgcggcgaagagcgataacggtgccagcaatctgctgcgtctgccgccagcctcttcctccacaaccagtggagcaagcaacacgagctccaccagtcagggcgatattatggaccaacgccgcgccaacgcgcagcgtaacgactaccagcgtcagggggaataacgatgcgtaagagtgttatcgcgattatcatcatcgtgctggtagtgctttacatgtctgtctttgtcgtcaaagaaggtgagcgcggtattacgctgcgttttggtaaggtactgcgtgacgatgacaacaaacctctggtttatgagccgggtctgcatttcaagataccgttcattgaaacggtgaaaatgctcgacgcacgtattcagaccatggacaaccaggccgaccgctttgtgaccaaagagaagaaagacctgatcgtcgactcttacatcaaatggcgcatcagcgatttcagccgttactacctggcaacgggtggtggcgacattagccaagcggaagtgctgttgaaacgtaagttctctgaccgtctgcgttctgaaattggtcgcctggacgtgaaagatatcgtcaccgattcccgtggtcgtctgaccctcgaagtacgtgacgcgctgaactccggttctgcgggtacagaagatgaagttactaccccggcggcagataacgccattgccgaagcggcagagcgcgtaacggctgagacgaagggcaaagttccggtcatcaacccgaacagtatggcggcgctgggtattgaagttgtcgatgtgcgtatcaagcagatcaacctgccgaccgaagtgtctgaagcgatctacaaccgtatgcgcgccgagcgtgaagcggtagcgcgtcgtcaccgtagtcaaggtcaggaagaagcggaaaaactgcgcgcgactgccgactatgaagtgaccagaacgctggcagaagctgagcgtcagggccgcatcatgcgtggtgaaggcgatgccgaagcagccaaactgtttgctgatgcattcagtaaagatccggacttctacgcattcatccgtagcctgcgtgcttatgagaacagcttctctggcaatcaggacgtgatggtcatgagcccggatagcgatttcttccgctacatgaagacgccgacttccgcaacgcgttaatataacgactgcggtacaggtcaataaagccaccgcatcctcagggatgtcggtggttttctttttctataaggataatgaatgaatagcacaatctggctggcgcttgccctggttttggtactggaaggtttagggccgatgctttacccgaaggcatggaagaagatgatctctgcgatgaccaatttgcccgataatattttacgtcgttttggcggtggacttgtggttgcgggcgttgtggtctactacatgttgaggaaaacgattggctgaacaaaaaacagactgatcgaggtcatttttgagtgcaaaaagtgctgtaactctgaaaaagcgatggtagaatccatttttaagcaaacggtgattttgaaaaatgggtaacaacgtcgtcgtactgggcacccaatggggtgacgaaggtaaaggtaagatcgtcgatcttctgactgaacgggctaaatatgttgtacgctaccagggcggtcacaacgcaggccatactctcgtaatcaacggtgaaaaaaccgttctccatcttattccaagtggtattctccgcgagaatgtaaccagcatcatcggtaacggtgttgtgctgtctccggccgcgctgatgaaagagatgaaagaactggaagaccgtggcatccccgttcgtgagcgtctgctgctgtctgaagcatgtccgctgatccttgattatcacgttgcgctggataacgcgcgtgagaaagcgcgtggcgcgaaagcgatcggcaccaccggtcgtggtatcgggcctgcttatgaagataaagtagcacgtcgcggtctgcgtgttggcgaccttttcgacaaagaaaccttcgctgaaaaactgaaagaagtgatggaatatcacaacttccagttggttaactactacaaagctgaagcggttgattaccagaaagttctggatgatacgatggctgttgccgacatcctgacttctatggtggttgacgtttctgacctgctcgaccaggcgcgtcagcgtggcgatttcgtcatgtttgaaggtgcgcagggtacgctgctggatatcgaccacggtacttatccgtacgtaacttcttccaacaccactgctggtggcgtggcgaccggttccggcctgggcccgcgttatgttgattacgttctgggtatcctcaaagcttactccactcgtgtaggtgcaggtccgttcccgaccgaactgtttgatgaaactggcgagttcctctgcaagcagggtaacgaattcggcgcaactacggggcgtcgtcgtcgtaccggctggctggacaccgttgccgttcgtcgtgcggtacagctgaactccctgtctggcttctgcctgactaaactggacgttctggatggcctgaaagaggttaaactctgcgtggcttaccgtatgccggatggtcgcgaagtgactaccactccgctggcagctgacgactggaaaggtgtagagccgatttacgaaaccatgccgggctggtctgaatccaccttcggcgtgaaagatcgtagcggcctgccgcaggcggcgctgaactatatcaagcgtattgaagagctgactggtgtgccgatcgatatcatctctaccggtccggatcgtactgaaaccatgattctgcgcgacccgttcgacgcgtaattctggtacgcctggcagatattttgcctgccgggcgaacagtgtgatacattgctgtgtcgggtaagccattacgctatccgacacagtgttaaatcctcgcttttttccttccccgaactgaaataaattagcgacacagcttgtggctggtttatcatcaatataaatgtattttttcccgatttcccttttgaggttgatgtgcagttaacgagtttcactgattacggattacgtgcgctgatctacatggcgagtttgccagaagggcggatgaccagtatttctgaagtgactgacgtctacggcgtctcccgtaatcatatggtcaaaataatcaatcaacttagtcgtgccggctacgtgactgctgttcgtggaaaaaatggcggcattcgcctgggtaaaccggcgagtgcgatacgtattggtgatgtggtgcgcgagctggagcccttaagcctggtgaattgcagcagtgagttttgccacattacacctgcctgtaggttgaaacaggcactttctaaggccgtgcaaagttttcttacggaactggataactacacgcttgccgatttggttgaagagaatcaaccgctttataaattattgctggtggagtgacgaaaatcttcatcagagatgacaacggaggaaccgagatgagtcaagatcctttccaggaacgcgaagctgaaaaatacgcgaatcccatccctagtcgggaatttatcctcgaacatttaaccaaacgtgaaaaaccggccagccgtgatgagctggcggtagaactgcacattgaaggcgaagagcagcttgaaggcctgcgtcgccgcctgcgcgcgatggagcgcgatggtcaactggtcttcactcgtcgtcagtgctatgcgctgccggaacgcctcgacctggtgaaaggtaccgttattggccaccgtgatggctacggctttctgcgggttgaagggcgtaaagatgatttgtatctctccagcgagcagatgaaaacctgcattcatggcgatcaggtgctggctcagccgctgggtgctgaccgtaaaggtcgtcgtgaagcgcgtattgtccgcgtactggtgccaaaaaccagccagattgttggtcgctactttaccgaagcgggcgtcggctttgtggttcctgacgacagccgtctgagcttcgatatcttaatcccgcccgatcagatcatgggcgcgcggatgggctttgtggtcgtagtcgaactgactcagcgtccgactcgccgcaccaaagcggtgggtaaaatcgtcgaagtgctgggcgacaatatgggcaccggcatggcggttgatatcgctctgcgtacccatgaaattccgtacatctggccgcaggctgttgagcaacaggttgccgggctgaaagaagaagtgccggaagaagcaaaagcgggccgtgttgatctgcgcgatttaccgctggtcaccattgatggcgaagacgcccgtgactttgacgatgcagtttactgcgagaaaaaacgcggcggcggctggcgtttatgggtcgcgattgccgacgtcagctactatgtgcgtccgagtacgccgctggacagagaagcgcgtaaccgtggcacgagcgtgtacttccctagccaggttatcccgatgctgccggaagtgctctctaacggcctgtgtagcctcaacccgcaggtagaccgcctgtgtatggtgtgcgagatgacggttagcagcaaaggccgcctgacgggctacaaattctacgaagcggtgatgagctctcacgcgcgtctgacctacaccaaagtctggcatattctgcagggcgatcaggatctgcgcgagcagtacgccccgctggttaagcatctcgaagagttgcataacctctataaagtgctggataaagcccgtgaagaacgcggtgggatcagttttgagagcgaagaagcgaagttcattttcaacgctgaacgccgtattgaacgtatcgaacagacccagcgtaacgacgcgcacaaattaattgaagagtgcatgattctggcgaatatcagcgcggcgcgtttcgttgagaaagcgaaagaaccggcactgttccgtattcacgacaagccgagcaccgaagcgattacctctttccgtagtgtgctggcggagctggggctggaactgccgggcggtaacaagccggaaccgcgtgactacgcggagctgctggagagcgttgccgatcgtcctgatgcagaaatgctgcaaaccatgctgctgcgcagcatgaaacaggcgatttacgatccagaaaaccgtggtcactttggcctggcattgcagtcctatgcgcactttactagcccgattcgtcgttatccagacctgacgctgcaccgcgccattaaatatctgctggcgaaagagcaggggcatcagggcaacaccactgaaaccggcggctaccattatagcatggaagagatgctgcaactgggtcagcactgtagcatggcggaacgtcgtgccgacgaagcaacgcgcgatgtggctgactggctgaagtgtgacttcatgctcgaccaggtaggtaacgtctttaaaggcgtaatttccagcgtcactggctttggcttcttcgtccgtctggacgacttgttcattgatggtctggtccatgtctctagcctggacaatgactactatcgctttgaccaggtagggcaacgcctgatgggggaatccagcggccagacttatcgcctgggcgatcgcgtggaagttcgcgtcgaagcggttaatatggacgagcgcaaaatcgactttagcctgatctccagcgaacgcgcaccgcgcaacgtcggtaaaacggcgcgcgagaaagcgaaaaaaggcgatgcaggtaaaaaaggcggcaagcgtcgtcaggtcggtaaaaaggtaaactttgagccagacagcgccttccgcggtgagaaaaaaacgaagccgaaagcggcgaagaaagacgcgagaaaagcgaaaaagccaagcgcgaaaacgcagaaaatagctgcagcgaccaaagcgaagcgtgcggcgaagaaaaaagtggcagagtgatcaataccctctttaaaagaagagggttagattgctgacaaaatgcgctttgttcatgccggatgcggcgtgaacgccttatccggcctacataatcacgcaaattcaatatattgcagagatcatgtaggccggataaacgtagtgcatcaggcaaaacgtaaacaacgagtacattaatgagcgaaatgatttacggcatccacgcagtgcaggccctgctggagcgcgcccctgaacgttttcaggaagtctttattttaaaaggccgtgaagataaacgtctgttaccgctgattcacgcccttgagtctcagggcgtggttatccagttggcaaaccgccaatatctcgacgagaaaagcgacggtgccgtgcatcagggcattatcgcccgcgtgaagccaggacgtcagtatcaggaaaacgatctgccggatctgatcgctagcctcgatcaaccgttcctgctgatcctcgacggcgtaaccgatccgcacaacctcggcgcgtgcctgcgtagtgcggacgccgcaggcgttcatgcggtgattgtgccgaaagatcgctccgcacagctcaacgctacggcgaaaaaagtagcctgcggcgcggcagaaagcgttccgctgattcgggtgactaaccttgcgcgcaccatgcgtatgttgcaggaagagaatatctggatcgtcggtacggcaggcgaggcggatcatacactctatcagagcaaaatgaccggacgcctggcgctggtgatgggtgcggaaggtgaaggtatgcgtcgcctgactcgtgaacattgcgatgagttgatcagcatcccgatggctggaagcgtttcttccctgaacgttagcgttgcgaccggaatttgcttatttgaagcggtgcgccagcgcagctaatttctcagaattatgaaaagccatccagatttggatggtttttttttgtctatagctggtaagataattacgtattgcaaatattcattttattaatatttaaacttaatctatatggaataatatatgacatggaatccgttggcgctagcgacggcgctgcaaactgtacctgaacaaaatattgatgtaacaaatagcgagaacgcattaattattaaaatgaatgattatggcgatttgcaaatcaatattctttttacttcccgccaaatgattatcgaaacctttatttgtccggtgagtagtatcagcaatccagatgaatttaataccttcttattaagaaatcagaagatgatgccgttgagtagcgtagggatctccagcgtacaacaggaagagtattacattgttttcggggcgttaagccttaaatcttctcttgaagatatcctgcttgagataaccagcctggtagataacgcattggatctggctgaaattacagaagaatatagtcactaattacaaggacgggtatttatgggaattttaaaaagtttatttacgctggggaaaagctttatctcccaggcggaagaatccattgaagaaacccagggcgtgcgcatgctggaacagcatattcgtgacgctaaagctgaactcgataaagccggaaaatctcgcgttgatctgctggcgcgggtgaaattaagtcacgataagctgaaagatttacgtgagcgcaaagccagtctggaagcccgtgcgctggaagcgttaagcaagaacgttaatccgagcttgattaacgaagttgctgaagaaatcgcgcgccttgagaatctcattaccgctgaagagcaagtgttgagcaatctggaagtctcccgtgatggcgtggaaaaagcagttacagcgacagcgcagcgtatcgctcagtttgagcagcaaatggaagtcgttaaagccactgaagccatgcagcgtgcacaacaggctgtaacaacctctaccgttggcgcatcttccagcgttagcacagcggcagaatccttaaaacgcctgcaaacgcgtcaggccgaacgtcaggctcgcctggatgctgccgcacagttggagaaagtcgcagacggtcgcgaccttgacgaaaagctggcggaagccggaattggcggtagcaataaaagtagcgcccaggatgtattagcaagactgcaacgccaacagggcgagtaatttttttgccagcctcgctaaaaggctggcaactattttaaggataaaatatgtctggttttttccagcgtctgtttggcaaggataataagccagctatcgctcgtggtccgctgggacttcatctcaatagtggctttacgctcgacacgttagcgtttcgtttgctggaagatgaattgctgattgcgctgccgggtgaggaatttacggtagccgccgtcagccacatcgatctgggcggcggtagtcagattttccgctactacactagtggcgatgagtttctgcaaatcaataccaccggcggcgaagatattgatgacattgatgatatcaagctctttgtctatgaagagagctacggtatcagtaaagagagtcactggcgcgaggcgatcaacgccaaagcgatgggagcaatgaccttaaactggcaggaaaaacgctggcagcgattttttaacagcgaagaaccgggaaatatcgaacccgtctacatgctggaaaaagtagaaaatcaaaaccatgccaaatgggaggtccataattttaccatgggctaccaacggcaagtaaccgaagatacttacgaatatttgctgctaaatggtgaggaatcttttaacgatctcggcgagccagagtggttatttagccgcgcgttgggtgtcgatatcccgctgacaagtcttcatattattggttaattacaaggacgtttacaatgcatatactggatagtcttcttgcctttagcgcctatttttttattggcgtggctatggtgattatttttctgtttatctattctaaaattacaccgcacaacgaatggcagttaatcaaaaacaataataccgcggcgagtctggcgttcagcggtacattgttgggttacgttatccccttatccagtgcggcaatcaatgcggtgagtattccagactatttcgcctggggcgggattgcactggtgattcagttactcgtttttgctggtgtcagactttatatgcccgcattaagcgaaaaaattattaatcacaataccgcagcaggaatgtttatgggaaccgccgcgctggctggcggtatttttaacgcagcttgtatgacatggtaatggacgatcatggccagaaaacgcaaaagtagaaataacagtaaaattggtcacggagcgattagtcgcattggtagaccgaataatccttttgaaccgtgccgcaatcgctacgcacaaaaatacttaacgttggcgctaatgggcggtgccgcttttttcgtattgaaaggttgtagcgatagtagcgatgtcgataacgacggcgacggaacgttttacgcgacagtgcaggattgtattgatgacggtaataatgccgacatttgcgcgcgtggctggaacaacgccaaaacggcattttatgccgatgttccgaagaatatgactcagcagaactgtcagtctaagtacgaaaattgctactacgacaatgttgaacagagttggatcccggtcgtttctggatttttgttaagccgggttattcgtaaagatcgcgatgagccgtttgtttataacagcggcggttcctcttttgctagccgcccagtctggcgcagcacttctggtgattactcctggcgctccggttctggcaaaaaagagtcttactctagcggcggctttaccaccaaaaaagcgtctaccgtttctcgcggcggctatggtcgttcttccagcgcccgtgggcattggggaggctaatcatgctgagacacaacgttcctgtgcgacgggatctggaccagatcgccgctgacaacggtttcgactttcatatcatcgacaatgaaatctattgggatgagagtcgggcttaccgttttactctgcgccagattgaagagcagatcgaaaaaccgactgcggaactgcatcagatgtgccttgaggtggtggatcgcgcggtaaaagatgaagagatcctgacgcaactggcgatcccgccgttgtactgggatgtgatcgctgaaagctggcgcgcccgcgatcctagcctgtatggacggatggattttgcctggtgtggcaatgcgccggtgaagctgctggagtacaacgccgatacgccaactagtttgtacgagagcgcttatttccagtggctgtggctggaggatgcccggcgcagcggcattattccgcgtgatgccgatcagtacaatgctattcaggaacgcctgattagtcgctttagcgagctttacagtcgggaaccgttttatttttgctgctgtcaggacaccgatgaagacaggagtaccgtgctgtacttgcaggactgcgcccagcaggcagggcaggagagccggtttatctacattgaagatctcggtttgggcgtcggcggcgtactgaccgatcttgatgataatgtcatccagcgtgcatttaagctgtatccgctggagtggatgatgcgtgacgataacggtccgctgctgcgcaagcgtcgcgagcaatgggtggagccgttatggaaaagtatcttgagtaataaagggctaatgccgctgctttggcgcttcttccctggtcatcctaatcttcttgcgtcctggttcgatggcgagaaaccgcagattgccgctggcgaaagctatgtgcgtaaaccaatctatagccgcgaaggcggcaacgtcaccatttttgacggcaagaataacgttgttgaccacgctgatggtgattacgccgatgaaccgatgatctaccaggcgtttcaacctctgccgcggtttggcgatagctacacactcatcggtagctggattgtcgatgatgaagcgtgcggaatggggatccgtgaagataacacactgatcaccaaagacaccagtcgtttcgttccgcattacattgctggataagaatgttttagcaatctctttctgtcatgaatccatggcagtgaccatactaatggtgactgccattgatggagggagacacagtgcactggcaaactcacaccgtttttaatcaacctataccattaaataacagcaacttatacctgtctgatggcgcgctctgcgaagcggtaacgcgtgaaggtgctggctgggatagcgattttctagccagtattggtcagcagttaggaacggctgaatcccttgaactggggcggctggcgaatgtgaatccgcctgaattattgcgctacgatgcgcaaggacgccgtctggacgatgtgcgttttcaccccgcctggcacctgctgatgcaggcgctatgtaccaatcgggtgcacaatcttgcctgggaagaagacgctcgctccggcgcatttgtggcgcgcgcggcgcgttttatgttacatgcgcaggttgaggcagggagcttatgtccgataaccatgacctttgccgccacgccattgttgttacagatgttacccgcgccgtttcaggactggaccacgccgctattgagcgatcgctacgattctcacttattgccaggtgggcaaaaacgcggtttgttgattggcatgggaatgacggaaaagcagggcggttccgatgttatgagcaacaccacccgtgcagagcgtctggaagatggctcttatcggctggtggggcataaatggtttttcagcgttccgcaaagcgatgcgcatctggtgctggcgcagaccgcgggtggtctgtcctgcttttttgtgccgcgctttttgcctgacgggcaacgcaacgcgattcgcctcgagcggctgaaagataagctgggtaatcgctctaacgccagttgcgaagtggagtttcaggatgccattggttggttgttggggctggaaggggaaggaattcgtctgatcctgaaaatgggtgggatgacgcgttttgattgcgccctgggtagccatgccatgatgcgccgtgcatttagcctggcgatttatcatgcacatcaacgccatgtttttggtaatccattgatccaacagccccttatgcgtcatgtcttaagtcgcatggcacttcagcttgaagggcaaacggcgttgctgtttcgtcttgcgcgagcgtgggaccggcgtgccgatgccaaagaagccctgtgggcgcgtttatttacgcctgcggcaaaatttgtgatctgcaaaagaggtatgccgtttgtggccgaagcgatggaggtgctgggcggcattggttattgcgaggagagtgagctgccgcggctttaccgggagatgccggtaaacagtatttgggaaggttccggcaatattatgtgcctggatgtgttgcgcgttctcaataagcaagcgggcgtatacgacttattgagcgaagcatttgtggaagtgaaagggcaggatcgctattttgatcgcgcggttcgtcgtttacagcagcagctgcgtaagccagctgaagaactggggcgagagattactcatcagctattcctgctgggctgcggtgcgcaaatgttgaaatatgcttctccgccaatggcgcaggcgtggtgtcaggtgatgttagatacgcgcggcggcgtacggttgagtgagcagatccagaatgatttattgctgcgggcgacggggggagtgtgtgtgtaagcgtatacgactgatgcgacgctggtttcgattaactaaatgaaatatgtgaaaattgtaggccggacaaggcgctcgcgccgcatccggcattgttcatttgctgtagatgacactcatgcatacagtatcgcctgtacgcgccagttatcaggctgctggtcttcgtacatggtaataatgcggtaccaactcgcaccttgttcatcggcctttaacgccacgatacgttccacgtcctgcggatccccactaatattgctaacactgatctgacctatttcattcaggcccgtcacgcagtcagcactggcgaattctgcagactgtgccgtggcgctcgcaggataagtcactaattgcaggctgggactggcaagtaattgtttcatcgtcagctccatttttcgtttccccacatgttgcagggcattccatcgcggtaataaacgcccaggcttccagccggtaatttattgtgcacaggtaaacgcatagggacgcaaagcaatgtaaagctgactatgtaagttgtctgatttatttacggtacaaaatggcttgactataccactgtcctgtcacgatggtttcgtccaccatgacgacaacgtaataatcagcttttgcagcgacagctttcgctttgatttctgctaatgcgtcatccggagaaccccgaaccatcgtgcttacgctacctattcgctgtaacccttgcgtctggtcgcggcgaatctcttgcggatggtccgttactggcggtgctggctgtggcgtaccttgcagtgcgctacaggcacttaacatcaacaccaataataaactggcaaaccggtaaataacgctattacgtttcctgctaaccatagtgtagtgccttattaatttaactttgggggaatgttcccgaattgttacctggtacgcgattttcgaatgaaaacgtgacgaaagcgtaacccacatctcaacattatgaactaataccgccagcagaaacttgtgctaaggatttcttcatgtcataccagacaaaaaggagagacagatgattgaaatagaaagtcgcgagctggcagatattcccgttcttcatgcttatcctgtcgggcaaaaagataccccgttaccgtgcgtaattttttatcacggctttactagttccagtctggtgtatagctattttgccgttgcgctggcgcaggctggtttgcgggtgatcatgccggatgcgcccgatcacggtagccgttttagtggtgacgcagcgcggcggttaaatcaattctggcaaatcttgctacaaagtatgcaggaattcactactttacgtgcggcaatagccgaagaaaactggctgcttgatgaccgtctggcagtcggtggcgcgagcatgggcgcgatgacggcactggggattaccgctcgccaccccacggtgagatgtaccgccagcatgatgggaagcggctattttacaagtctcgcccgtagtctgtttccaccgctgatacctgaaacggcagcacagcagaatgaattcaataacattgtcgcgccactggcagagtgggaagcgacaaaccacctggaacaacttagtgacagacctctactgctgtggcatggcctcgacgatgacgttgtgcctgccgacgaaagtctacgtttgcagcaggccttaagcgagacgggacgggataaactgctaacctgtagttggcagccaggcgtgcgtcaccgcattacgcctgaggcgttagatgctgccgtgacatttttccgccagcatctttaaacacgcagaatgctgaccccttgcgcttccagttgttgcaggatttccgggttagcatttttgccggtgataagcatatcgatttgatcggcacggctaaaaagcattcccgcgcgttcgccaatcttactgctatcaaccagtaccaccagtttccctaccacgctcagcatcttctgctctgccattgctgtcagcatatcggttttatacaacccttctgcggtcagcccttttccgctggtaaacatccagtgcccggcatagagactgttttcgctgccctgcgggcttaaagtgatggactgacttttgttgtactgtccgcccataatgatcacgctgtcatgttcttgatcgatcaggtaatttgccagcggtagataattagtgatgatttgcactggcttgccacacatttcccgcccaagcagaaacgcggtggagccgcagttgatgactacgctttcgcccggattaaccagctggctggccgctttagcgatacgtactttttcatcgtgattctgcgcctgatgcagattcatcggcgtccagcgcgggcgctgttgggtaatagcttctgcgccattgcgcacttttttcagtttgccgctttcgtcaagtttattgatatcgcgtcgcgcagtggcagggctaattcccagacgctcaacgactttctcaacggtcacaaagcccaattgtgcgagcatttccaggaggatttgatgtctttgtgcttcagtcatgagctattccgataaaatttgatttttttagatgatatttgaaatagccaggaaatactacgccggatagcgcgaacttctccacgctacccggtataaacgacagattacaggaaactcttgaacggcagatccggttcaatagtgaagcaatcatcgaaaccgcgcggatagtggtactcgaagttgtctttatccagcggccaggtaaatttgccacccacctgccagataaacggcttgaagccatacttcaggcgatcttttttcatctcccacagcacgcggatctcttgcggatcggcctggaagttactccagatatcgtggtggaacgggatcactactttcgcattcagcgcttcacccatacgcagcatatcggcgctggtcattttgtcggtgataccgcgcgggttttcgccgtagcttcctaacgccacgtcgatctgatgttcgttaccgtgcttcgcataatagttagagtagtgggagtcgccgctgtgatacagggagccgccaggcgttttgaacaggtagttcaccgcgcgatcgtccatgccatctggcagtacgccagccgctttttgatcggcaggcagggtgatcagtgcagtacggtcgaaagcatcaagcgcatgaatttcaatgtctttcacttttactacatcgcccggtttgaccacgatgcaacgctctttcggtacgccccagccaatccacaaatccacacaggttttcggtccgataaacggtacgtcatctgcacaattctgcatcacggcagcagcgacgttaacgtcgatatgatcgttgtgatcgtgagtcgccagtaccgcgtcgatctggcgaatcgcaaacggatcaagaacaaacggggtggtacgcaggtttggctgcagttttttcacgccagccatgcgctgcatctggtgaccctgtttcattaacgggttaccgtgactttgtttgccagtgccgcaccagaaatcaacgcaaacgttggtgccaccttcgcttttcaaccagatcccggtgcagccaagccaccacatcgcaaatgtgccaggagcgacctgttcttgttcaatttcttcattcaaccagctaccccactccgggaaagtgctcaggatccaggattcacgggtgatacttttcactttactcatcgccatttaccttcatgatagttcaattcgaatcaatatgtgattggttttgattaatcctgacactattttttcaggaaggcaatgaccattttttgactttttgccagggaagttgttgttgattttgagtatggaaagatttaatggaatgtgtaattcaattaactaaatgaatttaaatggataattgtttcgttgtgtgaatcccactctatccatgtggaattatttgcgggtcgcgtcacatttaatcataaataatcttgttgtgattacttttgaaaattagagtgagtgcacaacattccgggtgtgtggaatacccggttacctcttcttcaggagatcgttatggagatcctctacaacatctttaccgtgttttttaaccaggtcatgaccaatgccccgttgttgctgggtattgtgacctgtctgggctacatcctactgcgcaaaagtgtcagcgttattattaaaggcacgattaaaaccataattggtttcatgttgttgcaggcagggtccggcatcctcaccagcaccttcaaaccggtggtggcgaaaatgtccgaagtctacggcattaacggcgcaatttccgatacctacgctagtatgatggcaaccatcgaccgcatgggcgatgcctatagctgggtgggttacgccgtattgttagcgctggcgctgaacatctgttacgtgctgttgcgtcgcattaccggcattcgcacaatcatgttgaccggccacatcatgttccagcaggccgggttgattgccgttacgctgtttatcttcggctactccatgtggaccaccattatctgtaccgcgattctggttagcctctactggggcatcacttccaacatgatgtacaagccgactcaggaagtgacggatggctgtggtttctccatcggtcaccagcagcagtttgcaagttggattgcctataaagtcgcgccgttcctcggcaaaaaagaggagagcgttgaagacctcaaattgccgggctggctgaacattttccacgacaacatcgtctccacggcgattgtgatgaccatcttctttggtgccattctgctctccttcggtatcgacaccgtgcaggcgatggcaggcaaagtgcactggacggtgtacatcctgcaaactggtttctcctttgcggtggcgatcttcatcatcacgcagggtgtgcgcatgtttgtggcggaactctctgaagcatttaacggcatttcccagcgcctgatcccaggtgcggttctggcgattgactgtgcagctatctatagcttcgcgccgaacgccgtggtctggggctttatgtggggcaccatcggtcagctgattgcggttggcatcctggtcgcctgcggctccagcatcctgattattcctggctttatcccgatgttcttctctaacgccaccatcggcgtgttcgctaaccacttcggcggctggcgtgcggcgctgaagatttgtctggtgatggggatgatcgaaatctttggttgcgtctgggcggtgaaactcaccggtatgagtgcctggatgggcatggcggactggagcattctggcaccgccgatgatgcaaggcttcttctccatcggtatcgcctttatggccgtcatcattgtaattgcactggcttatatgttcttcgctggccgcgcgctgcgcgcagaagaagatgcagaaaaacaactggcagaacagtctgcttaataaggagttttgattatgaccgtacgtattctggctgtgtgtggcaacggacaaggcagttccatgatcatgaagatgaaagtggaccagtttttaacccaaagtaacattgaccatacggtaaacagctgcgcggttggcgagtacaaaagcgagttgagtggcgcggatatcatcatcgcttctacgcacattgcgggcgaaatcaccgtgaccggcaacaaatacgtggttggcgtgcgcaacatgctctctcctgccgactttggcccgaaactgctggaagtgatcaaagagcatttcccgcaggatgtgaagtaaggacgcgccatgaaattacgtgatagcctggcggaaaataaatccatccgcctgcaggctgaagcagagacatggcaggaagcggtgaaaatcggcgttgacctgctggtggcggcagatgtggtagagccgcgttactaccaggcgattctggatggcgttgaacagttcggtccttatttcgttatcgctccgggcctggcaatgccgcacgggcgtccggaagagggcgttaagaaaaccggtttctctctggtaacgctgaaaaagccgctggagttcaaccacgatgacaacgatccggtggatatcctcatcaccatggcggcggtcgatgccaatactcaccaggaagtgggcatcatgcagatcgtcaacctgtttgaagatgaagagaattttgaccgtttacgcgcctgccgtaccgagcaggaagtactggatctcattgaccgcaccaacgcggcagcttaagaaggaattgaacatgagtttaccgatgttgcaagtcgcgctggacaaccagactatggatagcgcctacgaaaccactcgcctgattgccgaagaagtcgacattatcgaagtgggcaccattctgtgcgtgggcgaaggcgtgcgtgcggttcgtgacctgaaagcgctctacccgcacaaaatcgtactggcagacgccaaaattgccgatgcaggcaaaatccttagccgtatgtgcttcgaagccaacgctgactgggtgacggtaatttgctgtgcggatatcaacaccgccaaaggcgcgctggacgtggcaaaagagtttaacggcgacgtgcagatcgaactgaccggttactggacctgggaacaggcgcaacagtggcgcgatgcaggcattgggcaggtggtttatcaccgcagccgtgacgcgcaggccgcaggcgtggcgtggggcgaagcggacatcaccgcgatcaaacgtctttccgatatgggcttcaaagtcaccgtcaccggaggcctggcgctggaagatctgccgctgttcaagggtattccgattcacgtctttatcgcgggccgtagtatccgtgatgccgcttctccggtggaagccgcacgtcagttcaaacgttccatcgctgaactgtggggctaaggagcggatatgttgtccaaacaaatcccgcttggcatctatgaaaaagcgctccccgccggggagtgctggctggaacgcctgcaactggcaaaaacgttaggcttcgattttgtcgaaatgagcgtagatgaaactgacgatcgcctgagccgcctcaactggagccgcgagcagcgtctggcgctggtcaatgcgattgttgaaaccggcgtgcgcgtgccgtccatgtgcctttctgctcatcgtcgtttcccgctgggcagtgaagatgacgcggtgcgggcgcaggggctggagattatgcgtaaagctatccagttcgcccaggatgtcggtattcgcgtgatccagctggcgggctatgacgtttactatcaggaagccaataacgaaacgcgtcgtcgtttccgtgacggcctgaaagagagcgttgagatggcaagccgcgcgcaggtgacgctggcgatggagatcatggattatccgttgatgagctccatcagcaaggcgctgggatacgcgcactatctcaacaatccgtggttccagctctacccggatatcggcaacctgagcgcgtgggacaacgatgtgcagatggagttgcaggccggaatcgggcatatcgtcgcggtacatgtgaaagacaccaaacctggcgtcttcaaaaacgtgccgtttggcgaaggtgtagtggatttcgaacgttgtttcgaaacgctcaaacagagtggctattgcgggccgtacctgattgagatgtggagcgaaacggcggaagacccggcggcagaagtggcgaaagcgcgtgattgggtgaaagcgcgcatggcgaaagcgggcatggtggaggcggcataatgcaaaagctaaaacagcaggtatttgaagccaacatggagctgccgcgctacgggctggtgacctttacctggggcaacgtcagcgctatcgaccgcgaacgcgggctggtggtgatcaagcccagcggcgttgcctacgaaaccatgaaagcggccgatatggtggtggttgatatgagcggcaaggtggtggaaggggagtatcgcccatcttccgacactgcgacgcatctcgaactctaccgtcgttacccgagccttggtggcattgtccatacccactccactcatgccaccgcatgggcgcaggcggggctggcgatcccggcgttaggcaccacgcacgccgactacttctttggcgacattccgtgtacgcgcgggttaagcgaagaagaggtgcagggcgagtatgaactgaacaccggcaaagtgattatcgaaacgctgggcaacgccgagccgctgcatacgccgggaattgtggtgtatcagcacgggccgttcgcctgggggaaagatgctcacgatgcggtgcataacgcggtggtgatggaagaagtggcgaaaatggcgtggattgcccgcggcattaacccacaactcaatcacatcgacagcttcctgatgaataaacacttcatgcgtaaacacggtcctaacgcttattacgggcagaagtaaaacacgcgctgcggaaatttccttcctcgggagataactggtctaattccgcagccgtttttcaaaaaaaagccccctgcgaagggggcaaagcaaactatggcaatgtttcgttggttatacctggtgttagcgataaatatccgcgctggcgtgcatattgccgttactccccggttcccgcatcagaattacgtggtagtacgttgcgccttgcgcatctgtttcttcatttaatgcctgacgtgcttcgctttcagtggcgaaattatgattgatataaatcacgcctaagctttgcacatcgtccatatttctggcctggtggttattaatttcaatggctgcccatgtatttgcacttagcaaaagcacagccagaagggctaaaacacgactgaacatagatacctcctcgacggctgactttgtgtgctctcctctgtgatgatcttctgatttaattttaatcaatgataaagaagttgatggtgaccatttctgatgcagttgttcaaaaaaacaccatgatgaagtgtgatgaacttcaaatcagcgtgttagaggttaattgcgaaaggggagatttatttcggctctgcccttgagtttagcgaggcatacaagtactataacgcgtcatttttcagccgacctttaacacgttccttgcctccccgggattcggctgacccagacaggaggctgaataatccgtaaggagcaattcgatgcgtcattacgaaatcgtttttatggtccatcctgaccagagcgaacaggttccgggcatgatcgagcgctacactgctgccatcactggtgcagaaggcaagatccaccgtctggaagactggggccgccgtcagctggcttacccgatcaacaaactgcacaaagcacactacgttctgatgaatgttgaagctccgcaggaagtgatcgatgagctggaaactaccttccgcttcaacgatgccgttatccgcagcatggttatgcgtaccaagcacgctgttaccgaagcatctccgatggttaaagcgaaagacgagcgccgtgagcgtcgcgatgatttcgcaaacgaaaccgctgatgatgctgaagctggggattctgaagagtaatttctgatgaccaaccgtctggtgttgtccggcaccgtgtgcagggctccccttcgaaaggtcagtccaagtggaattcctcactgccagttcgtgcttgagcatcgttctgtgcaggaggaagccggctttcaccggcaggcgtggtgtcaaatgcccgttattgttagcggacacgaaaaccaggccattactcacagtataacggtcggcagtcgcataaccgttcaggggttcattagttgccacaaggcaaagaacggactgagcaaaatggttttgcatgccgagcagattgaattgatagattctggagactaaccatatggcacgttatttccgtcgtcgcaagttctgccgtttcaccgcggaaggcgttcaagagatcgactataaagatatcgctacgctgaaaaactacatcaccgaaagcggtaagattgtcccaagccgtatcaccggtacccgtgcaaaataccagcgtcagctggctcgcgctatcaaacgcgctcgctacctgtccctgctgccgtacactgatcgccatcagtaatcggtcacggtccattaatacgactttgagaggataaggtaatgcaagttattctgcttgataaagtagcaaacctgggtagcctgggtgatcaggtaaacgttaaagcgggctatgctcgtaacttcctggtaccgcagggtaaagctgttccagctaccaagaaaaacattgaattcttcgaagctcgtcgcgctgaactggaagctaaactggctgaagttctggcagctgctaatgctcgcgctgagaaaatcaatgcactggaaactgttaccatcgcgtctaaagctggcgacgaaggtaaactgttcggttccatcggtactcgcgacatcgctgacgctgtaactgcagctggcgttgaagtggctaagagcgaagttcgtctgccgaacggcgttctgcgtaccactggcgaacacgaagtgagcttccaggttcacagcgaagtattcgcgaaagtgatcgtaaacgtagtagctgaataattcgttattcaacgagacgtaaaaacgccgaccattggtcggcgttttgctttctatttttcgtcaggtattagtttcgcaagtagatccattcaccattctcttgtgtccataagtcaggatggtttgctggcgttagatacatacgagcgcaactgatgtctcgctcctgcggcactcgctcgaaacccaaaccgctgtagattgcggcactactacttaaggaacgcagaccaattttcaaatcatggggtaaatcagaatacgcgtttagcaatgcagcaatgatgaatccgagggcattagaaacgcctgtaacagtgcgaagttggtcgatataaagatcgattgttggtagttcagaactccagcaattaggcatttgggcaggaagggttacaacgtatcctatcgtttggccggtatagtctggagtaccataaccaggtcccaaaaccacttcgtgtattgtgtatttactgttgggttcgaaggattcgacatcttgcaataaatatttcagttctgcggttaacctcgcacccgcgtaagctttattgtatttctgggcgtgaatattatctaatgtagcttcatggttccatccaaaagaattatcaccattcattgtgattccatcgtaagcattacacctcgtcgctaacttattgaatgcttgccagtcactgagatctagtttgtggatctcaacagtacgtctgccatcgcaattatgatctcttccacgattactaagtaatgtagcgcgtgcgtattgatgaaattttaattttactggtttgtcggtggagctaaaacgagataaatatgcaggaaaactataaatagtcgttggtaatgtcattgtaatgttacctgtttaatgtttttataaatatcgcagctgaatgttcacagaaaaaaatcgatattaataaaaataagtttgttttctgaagtggtgaaaatagcggatggtgaaagatattaatatcaaaaatcgctcattatggatataacgatgcacccggggagaaaatgacttccacgccttacaccgtacattcttgttgtgcggtatgtaattattctacgctgtcggtatcggtgtattcgttaatcagcaggttagccagccacaaaaagccattgagaaaattattgattttacatgggattattatattgctaatccttggtttttaaaaattgtgcatagtgaaaatcaaagtaaaggtgtgcattatgcaaaaagtcagcgtctcttagaaattaaccatgcgcacttgcagttaatggaatccttattggatgaagggaagaaacacaatatttttaagccagatatcgacccattgcaggtgaatattaatattgctgcgcttggcggatattatttgatcaaccagcatacgcttggcctggtttatcacatcagtatggttagtccccaggcactggaagccagacgtaaggtcatcaaagagacaatccttagctggcttttggttgaccctagttctaccgcgcacgaataattaccgcgcacgaataaaactgccatccggctggcgggtgaacaggacctgttgattattccccgtatcaatggttaagcccgtcaccacgccgctggcgttctggcggattttcaccatctgcccgttttgcaaattactcagcggcttacccgcgccttctacctgcgccattgcatagacatcggtagcgggcagtccgtggtcgcggaacagctgcgccatcgttttaccgggttcgacacggtaagagcgccattgattatcaattccgctatctggctggaatggttgcgtttgggtagtttgcggctgctcttctggctggccttcctgtataggttctggagcgaccggagccacctgatcaggaccattttgtggggtaactaattgcgcccgcagctgttcttctgtcggcggttgactttggctctgaatatctaactgcgcttcacgcgtcaccaccggcgcgttgggcgtatcatcagatggaagcagaaatccgaccaccaatacaatggcggcaataatgatcccccgacgatgcatcggcggcagcgggtccatgaagcgaaaattgtccggcgcgtgccagactttctccagggttggttttagttcaaagcgcccgggcatggtttcctcctgctccgcgtcttgttcctcaatcatagcctatgaataagctaacgctatgatgtccgtggtaaacccgcctttattatattcatacgggatattgctattgtttctttttccctgggatttgtcatcattcccgcgacaaagttttacccaaagaagtgtggctgatatgctgcccgctactttataccctaagaaaggaaatacgatgaccaccccaacttttgacaccatcgaagcgcaagcaagctacggcattggtttgcaggtagggcaacaactgagtgaatctggcctggaagggctgctgccagaagcactggttgcaggtattgccgatgcgctggaaggcaaacatccggctgttccggttgatgtggtgcatcgcgcgctgcgtgaaatccacgagcgcgccgatgccgttcgtcgtcagcgtttccaggcgatggctgctgaaggtgtgaaatacctggaagaaaacgccaaaaaagaaggtgtgaatagcaccgaatctggcctgcaattccgcgtgatcaaccagggtgaaggcgcaattccggcacgtaccgaccgcgttcgtgttcattacaccggtaaactgatcgacggcaccgtgtttgacagctccgttgctcgtggtgaacccgctgaattcccggttaatggcgtgatccctggctggattgaagcactgactctgatgccggtaggttctaaatgggaactgactatcccgcaggaactggcatatggcgagcgcggcgcaggcgcatccatccctccgttcagcaccctggtgtttgaagtcgaactgctggaaatcctctaagcagcgcattctgttcccctcgaacgagaggggagcaggcattcagcaataaacccttcagtttgccaaacggcgctattttgtgttgcaaagaccccgtaagcgtgtatttttgtgagctgtttcgcgttatcaccgtgatatgacactcactttaaacataaaattaacattagatctaaatcttagtattcatcccgcgtattgttacctaatatcgatgagtcccgatacagattcgtcgtatcatagactgactaaaggccgtagagcctgaacaacacagacaggtacaggaagaaaaaaacatggtagatcaggtaaaagtcgttgccgatgatcaggctccggctgaacagagcctacggcgcaatctcacaaaccgacatattcagcttattgccattggcggtgccattggtacggggttgtttatggggtctggcaaaacgattagccttgccgggccgagcatcattttcgtttatatgatcattggttttatgctctttttcgtgatgcgggcaatgggggaattgctgcttagcaatctggaatacaaatcttttagtgacttcgcttccgatttactcgggccgtgggcaggatatttcaccggctggacttactggttctgctgggttgtaaccggtatggcagacgtggtggcgatcacggcttatgctcagttctggttccccgatctctccgactgggtcgccagcctggcggtgatagtgctgctgctgacgctcaatctcgccaccgtgaaaatgttcggtgagatggagttctggtttgcgatgatcaaaatcgtcgccattgtgagcctgattgtcgtcggcctggtcatggtggcgatgcactttcagagtccgactggtgtggaagcgagtttcgcgcatttgtggaatgacggcggctggttcccgaaaggtttaagtggcttctttgccggattccagatagcggttttcgctttcgtggggattgagctggtaggtacaacagctgcggaaaccaaagatccagagaaaagtctgccacgcgcgattaactccattccgatccgtatcattatgttctacgtcttcgcgctgattgtgattatgtccgtgacgccgtggagtagcgtagtcccggagaaaagcccgtttgttgaactgttcgtgttggtagggctgcctgctgccgcaagcgtgatcaactttgtggtgctgacctctgcggcgtcttccgctaacagcggcgtcttctctaccagccgtatgctgtttggtctggcgcaggaaggtgtggcaccgaaagcgttcgctaaactttctaagcgcgcagtacccgcgaaagggctgacgttcagctgtatctgtctgctcggcggcgtggtgatgttgtatgtgaatcctagtgtgattggcgcgttcacgatgattacaaccgtttccgcgattctgtttatgttcgtctggacgattatcctttgcagctaccttgtgtatcgcaaacagcgtcctcatctacatgagaagagcatctacaagatgccgctcggcaagctgatgtgctgggtatgtatggcgttctttgtgttcgtggtcgtgttgctgacactggaagatgacactcgccaggcgctgctggttaccccgctgtggtttatcgcgctggggttgggctggctgtttattggtaagaagcgggctgctgaactgcggaaataaccgcattatcatgctggatggcgcaatgccatccagcttttagatcactcacccgccagcgcgcgtgggaacagtacattgttttccagactgatgtgatccatcaggtcatcaatcagttcattaatgccgttatacatcgctttccaggtggtgcaggcttctggcggcggtgtgacgttattggtggtgtgtttaatcacttccagcagttcgcccgcttcatcgtgctcgctttccattacgctgattggccccattgcctggctgcccatgccttgtttgatcatcgggaagaggatctgctcttctttcatcatgtggctggaaagctcttcatgcagcatggtcaggtattttgtcagcccttttggcacgctcggtttgtcggcgtgaacgcgctcgactttagtcgcttgcagaatcagctccggcagttgctcgcggtgacgatcgtggtagcgcacgatgatatggtcgatgatttctgccagcggggcgctacgccagtctttctcaatcggttgttcagcgagctttgccagttcagcttcaatgacctcaacatccagttctttacgtgccgccgcgcgcgccagcgtctgcttaccgccacagcagtaatccatatcatatttacgaaacagagcactagcgcgaggaatagagagcgccagttcacctaaaggttggtcgcgataagccatagctgatacctcattcttaataagataagatgtattttaaatgcatctttaaggcaaaagctataacccttacgtagcagaggcttatttaactcactgccagcgtgtcaactttcactgacagattcagttaaaggtttttctggttttgctctgaccgcgatgaccacgccaatcactaacagcgcgataccgctcagcgtcattagcggcggcatttgctggcggagtaaaaaggtgtacagcaaacctgccagcgtttcgaaaacaatcagcggcccgagaatcactgtcggtaatagctggctggcgacgttccagcagagtgcgccaacccaactgcaaagcacggctatcgcaaccatcagactaataaacaccagcggacgggggccaaagggtagggagaagtccggcgtttgcgtattcagccagtaacaagcgacgagatagccgataagactaaccggcagtgtgaccagcgcctgcgctgttgcccacatcatcggatgtttgtcgggattttcccgcagccagcgggcgttgcgcagggcataccacgcccagcagaccacggaaactaacgccagcacgatgccagaggtataacgtgcccagtcaaaatcggggagtccgtggtttaactcagcaatattcacacacgccaggccgatgccaatacaaatcagtgctggggcgagttttccccacgcgagtttgccgtcgcgctggctataaagcagattggcaaagacaggaatgaccaccggcagggtgccgataatcatcgtggaaacaggcgcgccagtacgttgaatggcactggcaaggcagaagtaatagatgaggttgcccatcatagtgagcatcaaggcggtaagccagtcgcgacgcgccaactgacgcagacgcacgcgtcccagccaggcaatgggcagcgcaattaaccctaacgccagataacgccccatgctctgcaacatcgccgggtattccggcacgatcaacggcccgacaaaaataagcccccacatcaaccctgctaacagggcgtacagcacgccgctaatcattactggcatccattgatctgtcagaagaaagttcaggaagcagacatgattgctcccggcatcccgtcattatcagagaggatgcgggaggatgccactttaattaattagttattaacattaaaaagatggcttacgctttcggctaacgttgtcgttgggtggccaatcaatttgctaagtgttttgctgtcatcaaacagaccgcctttgcttgcgccaacgtcagaatccgccagcatatccgccagtccgtcgggcagtccgacgcttttcagtgccgcggcgaaatcggcttcgctcagattttgataggtaacctgtttgccgctctgtttggtcagctctgccgctaactgtgtcaacgtccaggcactatcgcccgccagttcgtaaaccttgccttcgtgaccggcttcgctaatcacgcgtgccgcagctgccgcataatctgcccgcgttgcactggcgattttgccatcgcccgccgcaccgataaatacgccgtgttccagtgctgccggggcgctggcgaggtagttttcgctgtaccagccgttgcgcagcagggtgtaaacgatgccagaatcagccagcattttctccgtctcgatgtgctcatcggcgaggccgagcggggaggtatctgcatgtagcaggctggtataagcgataaatttcacgccagccgcctttgcggcattaataacattacgatgctgcggggcacgttgacccacttcgctggaagagatcagcagtagtttttccactccctgaagtgcagatgtcagtgcggcttcatcgccgtagtcagcctgacgcacggtaatgccttgtgctgccagggcttgggcttttgccggattacgaacgatagccactatttggctggcaggaaccgttttcatcaaggattcaataacatagtgaccaagttggccagtggcaccagtaatagcgatcatgggaagtctccatcgttttgtcttgtgtttaaatacgctaacacctaaacttacttttagtaagtacgtacaaaaaggtaagtatgaaatgagtcaggttagcctgagccaacaactgaaagagggtaatctctttgcggaacagtgcccgagccgcgaggtgttgaaacacgtcaccagccgttggggggtgttgattctggtggcgctacgcgaaggtactcatcgctttagcgacctgcggcgcaaaatcggtggggtgagtgaaaagatgcttgcgcagagcttacaggcgttagaacaggatggttttcttaaccgtatcgcgtatccggtggtgccgccgcatgtggaatatagcctcacgccgctgggcgagcaggtgagcgaaaaggttgctgcactggcggactggattgagttgaatttgcccgaggtgttggcggtgcgggatgaacgtgcggcataactgccggatgcgctgagcttatctggtctacggtgcatggcttgtagggcggataagatgcgccagcatcgcatccgccaataaatgccggatgcggttgatgatttataggccgaaaaagaagtgttttacttactcaaatccacctgataaatcgcaaacccgatatcatcggtcgcgactttattcatcggatactgccctttctctttaataaacgctgcggctttatcactcggagaggtttcgaaacggatatccagtttcttatcgccagctatcggtgctaaacgccagttgttatctgccgccgggtgaatttcccccgcacgtttgctctcatcagcaatccacgctgccagcacgctgcggttctcatccggactagcaaaagcgatatggctgtcgcccgtaccggcaaatttgccgccgtaagcgcgatagttattggtggcaaccaggaacatggcgttcggatcaatcggcttgccattaaaggtcaggttcttaatcctttccgcattggcattaatcatctggcactcgccgtcataacgggcgggctgggtaacatcaatctgataattcacaccatcaataacatcaaagttataagtgcggaaaccatcccagttgatgagactctgtggtttcgtgctgttgggatcaatctggttaaactgtcccgcggagcactccagccactctttcacctctttaccgctggctttcaccacaatcagcgtattgggatagagataaagatcggcggcattacggaaggtcaactggcctttttccacctccacatagcttgccgggtcatttttgcgaccaccgactttaaacggtgcggcagcactaagcaccggcagttttgccagatccggatcgccctgaatgtaatgctcgacatacgctttttgcgcgttgttcaccacctgcacggtcggatcgtcctgcaccagcgccagatagctatacatattgtcggcagatttaccgattggcttgctgacgaactggcgtgtggcatcgtgatcggctttgagtgtttctaccagcttgctgtcttccgccgcgagggattttttattagcgatgtcgtaaatcggtcgtgcttccgctttcgcctgcgtcacctgccatttaccgctgtcattactgagttgtaagtcgaccacaccaagatgatcgccccacatgcctggcattaccgccggaacaccattcagcgtgcctttggcgatatcagccccttcgatatcagcaaaatctttacctgggaaaacggcgtgagcatggccaaacataatggcgttaacgcccggaatttcactgaggtaataaacactgttttccgccatcactttatacggatcggcagatagcccggaatgtgccagaacgacaacaacatcggcacctttctcgcgcatttcaggcacgtatttgcgcacggtttcggtaatatcattcaccgtcactttcccggataaattagctttatcccagcccatgatttgtggtggcacgacgccaatatagccaatcttcagcgtctgtttttttccgtctttatcgaccacttcggtgtctttaattaaatacggtgtaaacattggctgtttggttctggcgtcaatgacgttggcatttacataagggaatttcgctcctgccagcgcatttttcaggtaatccagaccgtagttaaactcgtggttgccaagcgttccgacggtatagtccagcgtatttaatgccttatagaccgggtgaatatcacctgcttttaatcctttcgcgctcatgtaatcggccagcggactcccctgaatcaaatcgccgttatcaaccagtacgctgtttttcacttcattgcgggcatcgttaatcaggcttgccgtacgtaccagtccgaatttttccgtggcggtgtctttgtaataatcgaaatccatcatgttgctatgcagatcagtggtttccatgatacgcagatcgaccgtcgctgcattcacactggcggcaatcagcgtggccaggagcgttgcgctaaacttaatcatcagggacatccttttatcatcgggaatacgaaagaaaagggagaataaacgtcttacttatagaacagtgaagaatgccacaattttacgctttgaaaatgatgacactatcacagttggcgcattcattaacgatagggtataagtaaaacaataagttaacaccgctcacagagacgaggtggagaaatgttagatcaagtatgccagcttgcacggaatgcaggcgatgccattatgcaggtctacgacgggacgaaaccgatggacgtcgtcagcaaagcggacaattctccggtaacggcagcggatattgccgctcacaccgttatcatggacggtttacgtacgctgacaccggatgttccggtcctttctgaagaagatcctcccggttgggaagtccgtcagcactggcagcgttactggctggtagacccgctggatggtactaaagagtttattaaacgtaatggcgaattcaccgttaacattgcgctcattgaccatggcaaaccgattttaggcgtggtgtatgcgccggtaatgaacgtaatgtacagcgcggcagaaggcaaagcgtggaaagaagagtgcggtgtgcgcaagcagattcaggtccgcgatgcgcgcccgccgctggtggtgatcagccgttcccatgcggatgcggagctgaaagagtatctgcaacagcttggcgaacatcagaccacgtccatcggctctagcctgaaattctgcctggtggcggaaggacaggcgcagctgtacccgcgcttcggaccaacgaatatttgggacaccgccgctggacatgctgtagctgcagctgccggagcgcacgttcacgactggcagggtaaaccgctggattacactccgcgtgagagcttcctgaatccggggttcagagtgtctatttactaaattcagatggcagaaacagtgtatttcctgattctgccatcctgatttctcccaacctaaaaagttataaataaaaagagattgtatttaaagtgcaaaaattcaattgctaataagttacattttaataatgagcgttttttgatagtttacttctatagtgagatatttaatggcgacataaagtaaccaaataaaataaggttgtcatatgttacccaggatcagacacaataattttattggtgcggtggagttatttgtaaagtctagctatacaaaaacacatagtaacaatttttttaacaacatccatcatgcatttaagaaaaaagattggattagcaattatgatagcctgttaactttgagggagttctttcgttgcgcaactcagattgataaaagtggttatcaggtgcttagtagtaaaaatgaaactgttcacgccatggataagtttcttatcagtttcagccttaaagataacggtgccgaatatacaatgacattgcgaggtagtggatttgaatacgaagaaatacccataacaataaatgaatataacagtttcatggatttcaaaaaccgtgaatttccgttagaacaaaacagacgattgtatgcccgggatattctacagaaaaaacagtctgacataccgaaaaggattaaaggttatattcaccaggcgattggtgacgtgtctttaggttatgccttattggaggatatagtaagcaaattaaaacggggtaaatttgaactccaaataccaggaggtggaattaaagaatgcgatggatggtatatttacgaaaaaataattgatgataattttgccatagtcatagaatctttgggctttgcgcttaaaatctatggaggggatgaacgttttcgtaatggttcctctgttgttttggaggatgaagattactctcttatttataattttctggttaatgcaggttgccaacaagtcgaattagccgaacaagtggatgcgatagtaagtgcgaatctggccgcagatagcgatattaccaaagaaaagatttgcgagaaatataaaagcaccattgaggcgtttaaaaaagagcaactagcgttaccagtattagttcggcgtaagaacagtgagacttaattcccctatcccatagataacgataggggaaaattatttttgcagaatttatgttattgccattatttgagcaacttttgcagcaggtccatcacttgctgcacctcttccggtgtgagcgccccgtctttggcccattgcacgcgaccatccttatccagcaccactacagcggaactttcttcatccagctgccaggcaccgagcgcgacgccattgctatcgacaataaactggctccagggataaagctttttattactctccagactgctgcgcacaaacatcccactacccggaatcgcgtcgtcggtgttaacaatggtggtggtctggtaacgatcgtgcggtaacttcgcacttttaatcgcttcaatcagcgtcgcgtttttctcttttgcagaggtgcgaccagcaatatgttgcagtactcgcacttttcccactaactgcgcgctgttccaggttttgtagctaaactgatctttatcaagcaccaactcgccccgatcggtaatgccaatcggcggcactcgctgaccggtttcgaactgatgtgcggaagccatcatcggcaacagcaggcaggtgagtgccagaatcttgcgtagggtcatggtgtttccttcttatgatatgcaggtgatccgaccacttgggtctgagttttaatcatatgtgctatttatcgaatttcccgcaagtgtgatgccagtttgcggtcaagcgcacaaatcatatgaaaaatgaatgcttatactgaagaccgcgcttcggtaaaaagataattctgaataattgtaacctttaggtaaaaaaagttatacgcggtggaaacattgcccggatagtctatagtcactaagcattaaaatttgcgcctcataatagttgggccgattgtggcaccgcacaggcgtaatactcagcaggagataacaatgaaaattttccaacggtacaacccacttcaggtggcgaagtacgtaaagatcctgttccgtggacggttatacatcaaggacgttggcgcttttgaattcgataagggtaagattcttatcccaaaagtgaaggataagctgcatttgagtgtgatgtccgaagttaaccgtcaggttatgcgtctgcaaacagagatggcttaaccaaagtgctatgcagtaaaaagtgctatgcagtaataagacggctcctgattcaggagccgttgatgtttctgggggttacgcgacgctttcttctttatctttagcgtcaggcagttttgggctaagggcggtggccttgctgtcgatccgggtcaccagcagctggtcgatgcggtagttatcgatatccaccacttcaaatttgtagccggcgaatttcacgctatcggtgcgtttcgggatcttacgcagcataaacatcataaagccgccgatggtttcgtagttgccgctctgcgggaactcgtcaatatccagcacgcgcatgacgtcgtcaattggggtgccgccgtcaatcagccaactgttctcatcacgggcgacaatctgctcttccagcccctgaccgaccagatcgcccatcagcgtggtcatcacgtcattgagggtgatgatccccaccaccagcgcgtactcgttcatgatcaccgcgaagtcttcacctgcggttttaaaactttccaacgcctcactaagggttaacgtatccggcacaatcagcgtgttgcgaatttgtacgccgctgttcagtgccaggctttggttagccagcacgcggttcagcaggtctttagaatcgacataaccgatgatgtggtcaatatcttcattacagacgaggaacttagagtgcggatgttccgccaccttattcttcaggctttgctcatcttcgtggagatcaaaccaaatcacgttttcacgcggtgtcatactagacggaacggtacgggattccagctcaaagacgttttcaatcagctcgtgttcctgtttacgtaacacgcccgccagcgcaccggcttccactaccgcgtagatgtcatcagaagtgatgtcatctttacgtaccattggcagtttgaaaatacggaagattatgttcgccaggccgttgaagaaccacaccagcggggtgcaaacgtacaggcagaagcgcatcgggttgatgatacgcaaagccacagcttctggcgcaatcataccgatgcgtttcggggttaaatccgcaaacaggataaacatgccagtcactaagctgaaagagagaataaagctcagttgctcagagagctctgcgctcatatagcgggagaacaggctgtgaaaagctggagaaaatgccgcatcaccgacgataccgccgagaatcgccactgcgttcagaccgatttggaccacggtaaagaacatgccgggattttcctgcatattcagaacgcgttgggcatttatattgccttcatcagccagcagtttaagtttgattttgcgactggcggcaaggctgatctcggacatgctgaagaacgcacttacagcgatcaagcagagtatgactaaaatactgtttaacatatcttatccgacctttcaggccagatcctcggaaggggaagttgattaatttgtgtgaaatacacattgaaagccgattcgaagaaagtgaaccggcattttcagtggctagtatagcgtaaggtactgtaaagccgccagagggttaaaattcagacagctgaaaaatgcaaaactgcctgatacgctatgccgatcaggcctacgcagtccttgcaatatattgaatttggacgattttgtaggcctggtaagtcgtttacgccgcatcaggcatagacaaagagcactttatcaacaaactacatttgtacccgtaacgttatgcttccggcggcagacagacgccaattccgccaattccacagtaaccatacgggtttttatgcagatattgctggtggtcatcttcggcataataaaacggtgtggcgttagcgatttccgtggtgatgtgacgatcgtcatcggcggcaagcatcgccgcctgaaaacgttccagactggcgcgagctgcggcatcctgttctggggtcagcggataaatcgcactacgatactgcgtgccgtggtcattgccctgacgcattccctgggcgggatcgtgattctcccaaaatacctgtagcaactgctcatagctgatgacggaaggatcgtaaacaatgcgtaccgcttcggcatgacccgtatcaccggagcacacttcccgataagtcggatttggcgtatagccgccggtatagcctgcggcggtgctgtaaacgccgggtaactgccagaacagacgctccacaccccagaaacaacccatcgcaaaaatggcaatctccattccgtcaggtacattggtcatactgtgaccgttgaccgcatgcagcgtggctacgggcatcggggtgttacgtccaggcagggcatcggcgggggaaaccagatgctttttatcaaataaactcatggtgtcgctctcccgaaaatcggtcattggggttaaggttgtaacaagaggcgtatttgcacacaataaccaccgtgaataggtctaaagtaaaacataagaaatatttggggtttagtctgctttttaatccatattactggatttttgttaagccgtttaacggcgttccaggggcaggaaaaaaggatattcaggagaaaatgtgcgctatatccgacagttatgctgtgtaagcttactctgcttaagcggatctgccgtcgccgcgaacgtccgtctacaggtcgaggggttaagcggacagctggaaaagaacgttcgtgcgcagctttctacgattgaaagtgatgaagtgacgccagaccgtcgctttcgcgcacgcgtcgatgatgccatccgcgaaggtctgaaagcgctgggttattaccagccgaccattgaatttgatctccgtccaccgccaaagaaagggcggcaggtattgatcgccaaagtcacgccaggcgtgccggtgttaattggcggcaccgatgtggtattgcgcggcggcgcgcggaccgataaagactatttgaaattgctcgatactcgcccggctattggcacggtactgaaccagggcgattatgaaaatttcaaaaagtccttaaccagcattgcgttgcgtaaaggttatttcgatagcgaatttaccaaagcgcagctgggcattgcgctcggcctgcataaagccttctgggatattgattataacagtggcgaacgttaccgctttgggcatgtgacctttgaaggaagtcaaatccgcgatgaatacctgcaaaatctggtgccgtttaaagagggcgatgagtacgaaagcaaagatctggcagaactgaaccgccgactttctgctaccggctggtttaacagcgtggtggtggctccacaatttgataaagcgcgcgaaacgaaagtattaccattgacgggcgtggttagcccgcgaacagaaaacaccatcgaaaccggggtcggttactctacggacgtgggaccgcgcgtgaaagcgacgtggaaaaagccgtggatgaactcttatggtcacagtctgaccaccagtactagtatttccgcgccggaacagaccctcgacttcagctataaaatgccgctgctgaagaatccactggaacaatattatttggtgcagggcggttttaagcgcactgacctgaacgataccgaatctgactccactacgctggtggcttctcgctactgggatctctccagcggctggcagcgtgccattaacctgcgctggagtctcgaccactttactcagggtgaaattaccaataccacgatgctgttttatcctggggtgatgattagccgcacgcgttctcgtggtggcctgatgccaacctggggcgacagccaacgctactctatcgactactccaacacggcctggggtagtgatgtcgatttctccgttttccaggcgcagaacgtctggatccgcacactgtacgatcgccatcgttttgttacacgcggcacgctgggctggattgaaaccggtgatttcgacaaagtaccgccggatctgcgtttcttcgccgggggcgaccgcagtattcgtggctacaaatacaaatctatcgctccgaaatacgccaacggtgacctgaaaggggccagcaagttgataaccggaagcctggaataccagtacaacgtgaccggaaaatggtggggcgcggtgtttgtcgatagtggcgaagcggtaagcgatattcgccgcagcgactttaaaaccggtaccggggtcggcgtgcgctgggaaagcccggtcgggccaatcaaactcgattttgccgtaccggtcgcggataaagacgaacacgggttacagttttacatcggtctggggccagaattatgagtttatggaaaaaaatcagcctcggcgtggttatcgttatcttactgttgctgggaagcgtggcgtttctggtgggcaccaccagcggcctgcatctggtatttaaagcggcggatcgctgggtgccaggactggatattggcaaggtcaccggcggctggcgcgatctcaccttgtctgacgttcgttatgagcagccaggcgtggcggtaaaagcgggcaatctgcatctggctgtcgggcttgagtgcctgtggaacagcagtgtttgtattaatgatctggcgctgaaagacattcaggtcaacatcgacagtaaaaaaatgcctccttctgaacaggttgaagaagaggaagatagcggtccgctggatctctccacgccgtatcccatcaccctgacacgggtggcactggacaacgtcaacattaagattgatgacaccacggtaagcgtgatggacttcacctccggcctgaactggcaggagaaaaccctgaccctgaaaccgacgagcctgaaaggcctgctgattgctctgccgaaagtggcggaagtggcgcaggaagaagtggtcgaaccgaaaattgaaaatccgcagccggatgaaaagccgctcggcgaaacgctgaaagatctcttttctcgcccggtattgccggaaatgaccgacgtgcatttgccgcttaacctgaacattgaagagtttaagggcgagcagctgcgcgtgacgggcgacacggacatcaccgtgagcaccatgctgctgaaagtgagcagcattgacggcaatactaaactggacgccctggatatcgattccagtcaagggatcgtcaacgccagcggcacggcgcagctgagtgacaactggccggtggacatcactctcaacagtacactgaacgtggagccgttgaaaggtgaaaaagtgaagctgaaaatgggcggcgcgctgcgcgaacagctggagattggcgttaatctttccggtccggtggatatggatttacgcgcccagacgcgactggcggaagccggattgccgctcaacgtggaagtgaacagcaaacagctttactggccgttcactggtgagaagcagtatcaggcggatgatctgaaactgaaacttaccggcaaaatgaccgattacacgctctctatgcgtacggcagtgaagggacaggagatcccgcccgcgactattaccctcgacgccaaaggtaatgaacagcaggtcaatctcgacaaactcaccgtcgcggcgctggaagggaaaactgaactcaaggcgttgctcgactggcaacaggccattagttggcgcggtgagctaacgcttaacggcattaacaccgccaaagagttcccggactggccgagcaaactcaatggcttgattaaaacccgcggtagcctgtacggcggcacctggcagatggacgtgccggagttgaagctgaccggtaacgttaaacagaacaaagtgaacgttgacggcacgctgaaaggcaacagttatatgcagtggatgatcccagggcttcatctggaactcgggccaaacagtgccgaagtgaaaggcgagctgggggtaaaagatctcaatcttgatgccaccatcaacgcgccggggctggataacgcgctgccggggcttggcggtacagcgaaagggctggtgaaagtacgcggcacggtggaagcgccacaactactggcagatatcaccgcgcgcggcctgcgctggcaggaactttccgtggcgcaggttcgcgtggaaggcgatatcaaatccaccgatcagatcgccgggaaactcgacgtacgcgttgagcaaattagccagccggatgtaaatatcaacctcgtcaccctgaatgccaaaggcagcgaaaagcagcacgagctacagttgcggattcagggggagcctgtctccgggcagcttaatctggcaggaagttttgatcgcaaagaagaacgctggaagggaactcttagcaatacccgcttccagacgccggttggcccgtggagcctgacccgcgatattgcgctggattaccgcaataaggagcaaaaaatcagcatcgggccacactgctggcttaacccgaatgcggaactgtgcgtgccgcaaactatcgatgcgggggccgaagggcgtgcggtggtgaatctcaaccgcttcgacctcgccatgctgaaaccgtttatgccagaaaccactcaggccagcggtatcttcacgggtaaagcggacgttgcctgggacaccacgaaagaggggctgccgcagggcagtatcacccttagcgggcgtaacgtgcaggtaacgcaaaccgtcaacgatgcggcgctgcccgtggcgtttcagacactgaatctgacggcggaattgcgtaacaaccgtgccgaattgggctggaccatccgcctgaccaataacggccagtttgatggacaggtgcaggtgaccgatccgcaaggccgccgtaatcttggtggcaacgtcaatatccgtaacttcaaccttgcgatgataaaccccatctttacccgtggggaaaaagcagcggggatggtgagtgccaacttgcgtctgggtggtgatgtgcaaagcccgcagttgtttggtcagcttcaggttacgggtgtggatatcgatggcaactttatgccgtttgatatgcaaccgagccagcttgcggtcaactttaacggtatgcgcagcacgcttgccggtacagtacggacccagcagggtgaaatctacctgaacggtgatgccgactggagccaaattgaaaactggcgggcgcgggtaacggcgaaaggcagtaaagtgcggatcaccgtgccgccgatggtacgaatggatgtaagcccagatgttgtattcgaggctacaccaaacctgtttaccctcgatggtcgcgtggatgtcccttgggcgcgcatcgtggtgcacgatctgccggaaagcgcagtaggcgtctccagcgatgtggtgatgcttaacgataacctgcaaccggaagagccgaaaacggcgagcattccgattaacagtaacctgattgtccacgttggcaacaatgtgcgcattgacgcctttggcctgaaagcgcggctgacgggcgatctcaatgtcgttcaggacaaacaagggctgggtctgaacgggcagatcaacatccctgaagggcgcttccatgcctatggtcaggatctgattgtgcgtaaaggtgagttactgttctctggtccgccagatcaaccgtatcttaatattgaagctattcgtaacccggatgctacagaagacgacgtaatcgccggagttcgcgtcactggtctggcggacgaaccgaaagcggagatcttctctgacccggcgatgagccaacaagctgccttgtcttatttgctacgtggacaagggctggagagcgatcagagcgacagtgcggcaatgaccagcatgctgattggtttgggggttgcgcaaagtggccagattgtgggtaaaatcggcgagacgtttggcgtaagcaatttagcgctcgacacccagggagtaggcgactcctcccaggtagtggtcagcggctatgtattgccaggtctgcaagtgaaatacggcgtgggtatatttgactctatagcaacactcacgttacgttatcgcctgatgcctaagctatatctggaagccgtgtctggtgtagaccaggcactggatttgctctatcagttcgagttttaacaatgcgaatatttgtctacggcagtttacgccacaaacaaggcaacagtcactggatgaccaatgcccagttactgggcgatttcagtatcgataactaccagttgtatagcctgggccactatccaggcgcagttccggggaacggaacggtacacggtgaagtttatcgtattgacaacgccacgctggccgaacttgatgccttgcgcaccaggggcggtgaatacgcgcgccagttgattcagacgccgtacgggagtgcatggatgtacgtttatcaacgacccgtcgatggattaaagctaattgaaagcggcgactggttagacagggataagtaaccatatgcatacgccaccttcgggtggcgttgttttttgcgagacgactcgcattctgttttgtaattccctcaccttttgcttttctctccgagccgctttccatatctattaacgcataaaaaactctgctggcattcacaaatgcgcaggggtaaaacgtttcctgtagcaccgtgagttatactttgtataacttaaggaggtgcagatgcgtattaccataaaaagatgggggaacagtgcaggtatggtcattcccaatatcgtaatgaaagaacttaacttacagccggggcagagcgtggaggcgcaagtgagcaacaatcaactgattctgacacccatctccaggcgctacagccttgatgaactgctggcacagtgtgacatgaacgccgcggaacttagcgagcaggatgtctggggtaaatccacccctgcgggtgacgaaatatggtaaagaaaagtgaatttgaacggggagacattgtgctggttggctttgatccagcaagcggccatgaacagcaaggtgctggtcgacctgcgcttgtgctctccgttcaagcctttaatcaactgggaatgacgctggtggcccccattacgcagggcggaaattttgcccgttatgccggatttagcgttcctttacattgcgaagaaggcgatgtgcacggcgtggtgctggtgaatcaggtgcggatgatggatctacacgcccggctggcaaagcgtattggtctggctgcggatgaggtggtggaagaggcgttattacgcttgcaggcggtggtggaataaggtgtgtttatttatcgcgggcataaaaaaacccttactaaccgaagcccggcgttcagggttattacgccagaagaacttatttattctttgcgcgctcgaaggaggcaacgatttcagctttagcggcttctgcgttttcccaaccttcaactttcacccacttgcctttttcgaggtctttgtagtgctcgaagaagtgagcgatttgcgctttcagcagttcaggcagatcgttaacgtctttaatgtgatcgtattctttgctcagcttgctgtgcggaaccgcaaccagtttcgcatcttcaccggcttcgtcggtcattttcagaacgccaaccggacggcaacggatcacagaacccggctgcagcgggtacggagttgggaccagtacgtcaaccgggtcaccgtccagagacagggtgtggttgatgtaaccgtagttgcatggatagaacatcgcggtggacatgaagcggtcaacgaacagtgcgccgctctctttgtcgatttcgtatttgatcggatctgcgttagccgggatctcaataacaacgtagatgtcttccggcagatctttacccgcagggacgttgagtaagctcatgtctgtttcctttaaaaatatgtggcaaacaagtgccgagtattatagccaactcgcgccgaatgtcttcgcttgttttcgtcttcattttcctttttcaccagttttaagacggtatacagagcaggaaaatccataaccgtagccgcatttttcatagtgagatgaaagcgattacaaacttgtgattaacgttttatttacttttttgaagtgtgatgtaacgcaatctgttacataacgaattgtctatagttttttcgcgaacatcttttaaccaataataactaccccgacgaggacaaccctatgtggaaacgcttacttatagtctctgcagtcagcgcagccatgagctctatggcgttggccgctccattaaccgttggatttagccaggtcggaagcgaaagtggctggcgtgccgcagaaaccaatgtggcgaaaagtgaagccgaaaagcgcggaatcacgttgaaaattgccgatggtcagcaaaagcaggaaaaccagattaaagcggtacgttccttcgttgcacaaggggtggatgcgatctttatcgctccggtggtcgcgacaggttgggaaccggtattaaaagaggcgaaagatgccgaaatcccggtattcttgctcgatcgttccattgatgtgaaagacaaatctctctatatgaccaccgtcactgccgacaacatcctcgaaggcaagttgattggtgactggctggtaaaagaagtgaatggcaaaccatgcaacgtggtggagctgcagggcaccgttggggccagcgtcgccattgaccgtaagaaaggctttgccgaagccattaagaatgcgccaaatatcaaaatcatccgcagccagagtggtgacttcacccgcagtaaaggcaaagaagtcatggagagctttatcaaagcggaaaacaacggcaaaaacatctgcatggtttacgcccataacgacgacatggtgattggtgcaattcaggcaattaaagaagcgggcctgaaaccgggcaaagatatcctcacgggttccattgacggtgtaccggacatctacaaagcgatgatggatggcgaagcgaacgccagtgttgaactgacgccgaatatggcaggtcccgccttcgacgcgctggagaaatacaaaaaagacggcaccatgcctgaaaagctgacgttaaccaaatccaccctttacctgcctgataccgcaaaagaagaattagagaagaagaaaaatatggggtattgagggttgctatgcctgatgccgattcgtaggccggataaggcgctcgcgccgcatccggcgatggtgcactgaagcctgatgcgacgcttaccgcgtcttatcatgcctactgggagcacgctttacaccgggggaaaccatgacgaccgaccaacaccaggagatcctccgcaccgaaggattaagtaaatttttccccggcgtcaaagcgttagacaacgttgatttcagcctgcgccgtggcgaaatcatggcgctgctcggtgaaaacggggcgggaaaaagtacgctaatcaaagcattaactggtgtataccacgccgatcgcggcaccatctggctggaaggccaggctatcagtccgaaaaataccgcccacgcgcaacaactcggcattggcaccgtctatcaggaagtcaacctgctacccaatatgagcgtcgctgataatctatttataggccgcgaacccaaacgcttcggccttctacgccgcaaagagatggaaaagcgcgccaccgaactgatggcatcttacggtttctccctcgacgtgcgcgaaccgctcaaccgctttagtgtcgcgatgcagcaaatcgtcgctatttgtcgggctatcgatctctctgccaaagtgctgatcctcgatgaacccaccgccagtctcgacacccaggaagtggagttactgtttgacctgatgcgtcagttgcgcgatcgcggcgtcagcctgatttttgtcactcactttctcgatcaggtctatcaggtcagcgatcggatcaccgtcttacgcaacggcagtttcgtaggctgtcgggaaacgtgcgagctaccgcagatcgaactggtaaaaatgatgctggggcgcgagctggatacccacgcgctacagcgtgccgggcgaacattgttgagcgacaaacccgttgccgcgttcaaaaattacggcaaaaaaggaacgatcgcaccgtttgatctcgaagtacgccccggcgagatcgtcggtctggctggattgctgggaagtggacgtaccgaaaccgccgaagtgatcttcggtatcaaacctgctgacagcggcacggcgttgatcaaaggcaaaccgcaaaacctgcgaagcccacatcaggctagcgtactgggcattggcttctgcccggaagacaggaaaaccgatggcatcatcgctgccgccagcgtgcgggaaaatatcatcctcgctctccaggcccagcgcggctggctacgtcccatttcccgcaaagaacagcaagagattgccgaacgctttatccgccagcttggcattcgcacacctagtactgaacaaccgattgaatttctctccggcggcaatcagcaaaaagtgttgcttagtcgttggctactgacccgaccgcaatttctgatcctcgatgagccaacccgcggcattgatgttggtgcccacgccgagatcatccgcctgattgaaacgctatgcgccgatggtctggcgctgctggtgatctcctccgaactggaagagctggtgggctatgccgatcgggtgattatcatgcgcgatcgcaaacaggtggcggagatcccgctggcagagctttccgttccggcgatcatgaacgccattgcggcgtaaggagaacagtgtgatgcctcaatctcttccggacaccactacgccaaaaaggcgctttcgctggccgacggggatgccgcagctggtagcactgttgctggtgctgctggtcgatagcctggtagccccgcatttctggcaggtggtgcttcaggatgggcgtttgttcggtagccccatagacattcttaaccgtgcagctcccgttgcgttactggcgattggcatgacgctggtgatcgccaccggtgggattgatctctccgtaggggcggtgatggctatcgccggagccacaacggctgcgatgacggtcgcgggattcagcctgccgattgttttgttaagcgccctgggcaccggcatcctggcgggattgtggaacggcatactggtagcgatcctcaaaattcagccgtttgtcgccactctgatcctgatggtcgccgggcgcggcgtggcgcaactgatcaccgccgggcagatcgtcacgtttaacagcccggatctcagttggttcggcagtggaagcctgttgttcctgccaacgccggtcattatcgcggtgctgacgcttatcctgttctggctgttgacccgcaaaacggcgctggggatgtttatcgaagccgttggtatcaacattcgggcggcaaaaaatgccggggtaaacacgcgaatcatcgtcatgctcacttatgtgttgagcgggctgtgtgcggcgattgcgggcattatcgtggcggcggatattcgcggtgccgatgccaacaacgctgggttatggctggagctggacgccattctcgcggtggtgattggcggcggaagcctgatgggcgggcgctttaacctgctacttagcgtggtgggggcgctgattattcaggggatgaacaccggaattttgcttagcggctttccgccagagatgaaccaggtggtgaaagcggtggtggtgctttgcgtgctgattgttcagagccaacgctttatcagtctgattaaaggagtacgtagccgtgataaaacgtaatttgccactgatgatcaccatcggcgtctttgtgttgggttatctttactgcctgacccagtttcccggttttgcttccacaagagtgatctgcaatatcctgaccgataatgcctttcttgggatcattgccgttggcatgacctttgtgatcctcagtggtgggatcgatctctccgtcggtagcgtgatcgcctttactggcgtgtttctggcaaaagtgattggcgatttcggcctcagcccgctgctggcgtttccgctagtgctggtgatgggctgtgccttcggcgcatttatggggcttctgatcgacgccctgaagatcccggcatttatcattacgcttgcggggatgttctttttgcgcggcgtcagctatctcgttagcgaagagagcattccgataaaccatcccatttatgacacgctcagtagccttgcgtggaaaatccctggcggcggtcgcttaagtgcgatgggactgctgatgttggcggtggtggttatcggcatattcctcgcgcatcgtacccgttttggtaatcaggtatacgccattggcggcaacgcaacgagcgcgaatctgatggggatttccactcgcagcaccactattcgcatttatatgctctccaccggactggcaacgctggcggggattgtcttcagcatttatacccaggccggatatgcgctggcgggcgtaggtgtggaactggatgctatcgccagtgtggtaattggcggtacgcttttgagcggtggcgttggaacggtattagggacgctttttggcgtggcgattcagggactgattcagacttacataaactttgatggcacgctgagttcctggtggacgaaaatcgccatcggtattttgttgtttatttttatagcattacagcgtggattaacggtgctgtgggagaatcgtcagagtagcccagtgacaagagtcaacattgcgcagcaataaaaacgcctctccgtgtggagaggcgcaggagattacgcgtccgggaactcacggataaagcgttcgacatcttcaaccatatggtcgttgccgacaaagaaactacggcgctggtgcagggtttccgggatgatatccagaatacgctctttgccatcgctcgctttaccgcccgcttgttccgccaggaatgccatcgggttgcactcatacagcaaacgcagtttgccgtccgggtggctggcggtgcttgggtagagataaataccgcctttcagcaggttacggtggaaatccgcgaccagactaccgatataacgactggtataagggcggttggtggatttatcttcttcctggcagaatttaatgtacttcttcaccccgttcggaaacttaatgtagtttccttcgttgatggagtaggttttgcctttctccgggaagcgcatccgttcctggcacaggcagaaaacgccgaggctaggatcgtaagtaaaggcgtgaacaccgcatccggtggtgtaaaccagcatggtagaggagccgtataccacgtaacctgccgcaacctgtttgttaccaggctggaggaaatcttcttccgttaccggcgtgccaacaggcgtaacgcggcggtagatggagaaaatggtaccgacagagacgttaacatcgatgttggagctgccatccagggggtccatcagcaccacgtattttgcgtgttcacagccttcaaagacgacaatctcatcttcttcttcagaggcaatgcccgcaacgatatcgcgtgctttcagtgcggctttcagtttttcattagcgaacaagtcgagtttctgctgaacctcgccctgcacgttctcagcaccgctggcacccaggatatcaaccagtcctgctttgttgatatcgcgatggataatcttggcgcccagttttattgcgctcagcaaagcagtgagctcaccggtagcatgagaaaactcgtgctgcttttcgacaataaattcacctaacgttttcataaaactttccctgcaatgtttatggagtaaagcgaccgcaacaatcttaacaaataatctcaatgttgcgctcaggtgaatcgcgccagcaaattacggattatcctgaaatgcgtttctcacttgcccgacatatgcgtaaaatgagcggcagattaaaaaaggatagtgacgtatgcgcattcatattttaggaatttgtggcacatttatgggcggtctggcgatgctggcgcgccagttaggccatgaagtaacgggtagcgacgccaatgtgtatccgccgatgagcaccttacttgagaagcaaggcattgagctgattcaggggtacgatgccagccagctcgagccgcagccggatctggtgattattggcaacgccatgacccgtggaaatccgtgtgtggaagcggtactggaaaaaaatatcccttatatgagtggtccacagtggctgcacgattttgtgctgcgcgaccgctgggtgctggccgttgccggtacacacggcaaaaccaccaccgcgggaatggcgacctggattctggaacagtgtggttacaaaccgggctttgtaatcggcggtgtgccggggaactttgaggttagcgctcatctgggcgaaagcgacttctttgttatcgaagcggatgagtatgactgcgccttcttcgacaaacgctctaaatttgttcattactgcccgcgtacgctgatcctcaacaaccttgagttcgatcacgccgatatctttgacgacctgaaagcgatccagaaacagttccaccatctggtgcgtatcgttccggggcagggccgtattatctggccggaaaatgacatcaacctgaaacagaccatggcgatgggctgctggagcgagcaggagctggtgggtgagcagggtcactggcaggcgaaaaagctgaccaccgatgcttccgaatgggaagttttgctggatggcgaaaaagtgggcgaagtgaaatggagcctggtaggcgaacataatatgcacaatggcctgatggcgattgcagcggctcgccatgttggtgtagcgccggcagatgccgctaacgcgctgggtagctttattaatgctcgtcgccgtctggagttgcgtggtgaagcgaatggcgtcacggtatatgacgattttgcccatcacccgacggcgattctggcaacgctggcggcgctgcgtggcaaagttggtggtacggcgcgcattattgctgtgctggagccgcgcagcaataccatgaaaatggggatctgcaaagacgatctggcacctagtttaggtcgtgccgatgaagtcttcctgctgcaaccggcgcatattccgtggcaggtggcagaagtggcagaagcctgcgttcagcctgcacactggagtggcgatgtggatacgctggcagatatggtggtgaaaaccgctcagcctggcgaccatattctggtgatgagcaacggcggttttggtgggatccatcagaaactgctggatgggctggcgaagaaggcggaagccgcgcagtaattcggccttagccagatatagtatgcgtaggccggataaggcgttcacgccgcatccggcatttgagcatagtgcctgatgcgacgcttgatgcgtcttatcaggcctacaggtgcaccgtatccggcaaaccatactcacatcaacaacgaaaattacccttcgttctccgctaactcgcgcagatactggaaaatctggcgtgcggatttcggcggcttattcccttctttctctttcttcgcgttgcggatcagagtacgcagttgctgacgatcggcatcgggccacagatttaatacctcagcgatggcgtcatcaccttgatcgatcagacgatcgcgcaggttttccagtttatggaacagcaccacctgctggttgtgacggtttttcagcttatccagcgcctgacgaataggctctacgtcgcgctggcgcagcatcttaccgatgagctgcaactggcggcggcgaccttccatcttaatacgctgggcgagctcaatagccgcgcgcagatccgcatctaacgggatcttatccagcgcgtttttccccagatcaacaatttccgcgccaaggcgttttagctcctcggcatcacgtttaatttcacttttactgacccagataatttcatcgtcttcgtcttcgatgtcatcaccgggaacgtcgtcgagccagtcttcgggctgcttagtcatctcaggctccttaaaaaaagaggctaatgttaccagttaagatgcgcactgaaaaacggttctctgttagacttcagagaaactctctacattatggcacttgcaatgaaagtaatctctcaagttgaagcgcagcgcaagattctggaagaagcagtttccactgcgctggagttggccagtggcaaaagcgacggtgcggaagttgccgtcagcaagaccaccggcattagcgtaagcacgcgttatggtgaagtggagaatgttgaattcaatagcgatggcgcgctggggatcactgtttatcaccagaaccgcaaaggtagcgcaagttccaccgatttaagcccgcaggccattgcccgtactgtacaggcggcgctggatattgcccgttataccagcccagatccctgtgccggcgtggcagacaaagagctgctggcctttgacgcaccagatctcgacttgttccaccctgcggaagtttccccggatgaagccattgaactggcggcccgcgcagaacaggcggcattgcaggcggacaaacgcatcaccaataccgaaggtggcagctttaacagccactacggtgtcaaagtttttggcaacagccacggcatgttgcagggttactgcagtacgcgtcatagcctctccagctgtgtaattgccgaagaaaatggcgatatggagcgtgattacgcctacaccattggtcgtgcgatgagcgatctgcaaacgccagagtgggttggggccgactgtgctcgccgtactttaagccgtctgagtccgcgtaaactctccaccatgaaagcgccagtcatttttgccaatgaagtggcaaccgggctttttgggcatctggtgggggcgatagcgggtggaagcgtttatcgtaaatctaccttcctgctggatagcctgggtaaacaaattctgccggactggctgaccattgaagagcatccgcatctgctgaaagggctggcgagcacgccattcgacagcgaaggtgtgcgcaccgagcgtcgcgatattattaaagatggcatcctgactcagtggctgctgaccagctacagcgcgcggaaactggggctgaaaagcaccggacatgcgggcggtattcacaactggcggattgccggacaaggtctaagcttcgagcagatgctcaaagagatgggcaccgggctggtggtgacggaattgatgggccagggcgtgagtgccattaccggtgattattcccgtggtgcagcgggcttctgggtagagaatggcgaaattcagtatccggtgagcgaaatcaccatcgcaggtaatttaaaagatatgtggcgcaatattgtcaccgtcggtaacgatattgaaacacgcagtaatatacagtgtggttctgtgctgttgccggagatgaaaatcgccggacagtaaaaaaactggcgcgacctgccgcgctataaactaaaaaattacacaaaatcattcgcactgcatcgagacggaaagtgaatgagggccggggagcgtactcgcagtacgtgacccggtcgaatgagcgtagtcgtcgatgaggcagtgtgaaggatgaagtgtaaataaaaaaggaactattcttgcagtctcctcgttggtattcagttcggcgtcatttgctgctgatctcgaagacaatatggaaaccctcaacgacaatttaaaagtggtcgaaaaagccgataacgcggcgcaagtcaaagacgcgttaacgaagatgcgcgccgcagcgctggatgcgcaaaaagcaacgccgccgaagctcgaagataaaagtccggacagcccggaaatgaaagatttccgccacggtttcgacattctggtcggtcagattgacgacgcgctgaagctggcaaatgaaggtaaagtaaaagaagcgcaggctgctgcagagcaactgaaaacgacccgcaatagttatcacaagaagtatcgttaattcctcatttccctgttgcctgcactcaggtaacagggaacttatcatcgcaaatgatgcaccacctgattgctgctgccgcgccagatcagggaagggtcttttaaatcctgcacaaatttgccgtcgaccagcacgttaatcaaatcaacaacctgcatttgcgcagcgttgagttcgtcgagtttatagcctgtccacacccagatgtctttacccggacactcggcgcggatgcgttgtaccagtttcagaatatccggcacgttttgcggatgcagcggatcgccgccggagagggaaataccctggcgtttgatacgagtgtcattcagatcgttaatgatctggtcttccattgctttggtaaatggctgaccggaatttacccgccatgtgcttttgttatagcaaccggggcattcatgaacacacccggagacaaacagggtgcaacgagtgccggggccgttgacgatgtcgacaggatagtactgatgataattcattatttcgcctggcttatcagtccgcgtgtaggctgcatccggtaatcaatgcctgatgcgacgctgtcgcgtcttatcagacctggagcaattgccaaatgtaggccggataaggcgtttacgccgcatccggcatttgcttagctcagagtgaagattaacctatctgcccattccccaaatgtttaacgcggcgcttaacttcttcctgcttaccagcgttaaacggacgtgcatccgggctacctaaatatccgcacacgcggcgagttacgctcacacgggaggcgtcatggttaccacatttcgggcaagtgaagcctttgctggtgcactcgaactcaccggtaaagccacactcgtagcactcatcaatcggtgtattggtgccgtaatacggtacatgctgatagctgtaatcccagacatcttccagcgccttcaggttgtgctgaatgtttggatactcgccgtagcaaatgaaaccaccgttcgccagcggcgggtaaggcgcttcaaagtcgatcttgtcgtacgggttcaccttcttctccacatcgaggtggaaactgttggtgtagtaacctttatcggtcacgcccggcaccacgccaaactcagcagtatcgagacggcagaagcgatcgcacaggttttcactcggcgtgctgtagagactgaaaccataacccgtttcttctttccactgatccactgcctgacgcagacgttcaacaatggcgatacctttcgcgcgaagctgctcgttgtcgtaaacatgctcgccgccgaacagcgcgttaatggtttcgtggatgccgatgtaacccaggctaatagacgcacgaccgtttttgaagatttcagaaacatcatcgtcagcattgagacgcacgccacaagcaccttccatatagaggatcggggccacgcgcgctttcacgccttcgagacgagcgatacgggtcatcagcgccttacgtgccagcaccagacgttcatccagcagcttccagaaggtggcttcatcgccttttgcttccagagcaatacgcggcaggttcaggctgatcacgccgaggttgttacgaccatcgtggatctgctcgccgttttcattttcccacacgccgaggaagctgcggcagcccatcggagttttaaagctaccggtgactttcactacctgatcgtagttcaggatatccggatacatgcgcttgcttgcgcactccagcgccagctgtttgatgtcgtagttcggatcgccttttttatggttcaggccatcgcgaatcgcaaacaccagtttcgggaacaccgcagttttacggtttttaccgaggcctgcgatacggttacgcaggatgctttcctgaatcaggcggctttcccagctggtgcccaggccaaaaccaaaggttacaaacggcgtctgaccgttggcggtgtgcagggtgtttacttcgtactccagactctggaaggcatcgtagcactctttgatggttcgagagttagcgtagccttcggcgtccgggatgttccactcttctgcggtcttgcgatgtttgttgtagctggcagtgacaaacggtgccagcacttcatcgatacggttaatggtggtgccgccataaatatggctggcaacctgagcaataatctgcgcagttaccgcggttgccgtagagatgctcttcggcggttcaatctcggcgttccccattttaaagccctgggtcagcatgcctttcaggtcgatcaacatgcagttgaacatcgggaagaacggactgtaatcgagatcgtgatagtgaatatcgccacgctcatgtgcctgcaccacgtcacgcggcagcaggtgctgacgtgcatagtgtttagccacgatcccggccagcaggtcgcgctgggttggaatcaccttgctgtctttgttggcgttttcgttgagtaagctggcgttggtctgctcgaccagaccacggatctcctggttcaggcgaccgcgtttttcacgttcaatgtcgcgatcgtgacggtactcgatgtaagcacgagccagttgtttgtatggaccactcatcagctgattttcaactgcggtctggatctcattgatatccacctggttgcggccctgcatctgctcgctgacaaccgcggcaacagtggcgcaataatcggcatcatcgacttccgctgctttagctgcacgcagaatcgcttctttgatgcgctcacttttaaacggcactttgcagccgtctcgtttcatcacatgcggtgtcatgatcgctccatatttttaagaacaggttatccacagaaattgggaaaggcgttttccggttttttcgtttcgttttccggtgctttccgcaatcgccatccgcttatccacaacgccgcacctttttcgtggggagctgtagtagcaattatagtcgattaatacaacatattgggttgggacgcattttaaagtctatatatagtgctttgcatcaaggatgtttgagctttttttgatgtagctcaaagtaaaaagcagagcgtacggatgacgggcgctacagcgatatgtaaattttttaatgaatttgctggttgaaaaatcaacaaaaacaacatactgacagacaaaaccccggaatgaccggcattaccggggcttagggaagatttacttctgtaaccaccagacagcctcaaaaggccgtaaattcatggcacagggttgtggactggcttcttcgtagttatgcatcacaagctgccagttgccgcgcatttgccctgcctgccagggttggatctcacggctaaggttggcaatgaccagcaaggtttgccccttccattcacggcgatagcaccacaatacagggctgtttggcagcagatcctggtaattgccccatgtcaggatggcttcctgcttacgcagtgcgattaacttttggtaggtgtaaaacacgctggaatcatcggccagcgcggcttctacgttgatttgttgatagttatcgcccaggccaatccacggttcgccagccgtaaacccggcattatcgccgttgctccattgcatgggcgtgcgactgttgtcacgggatttactggcgaggattgccaataactcgtcggcatcacgcccatcgttgcgcagctcggcaaacatattgaggctctctacgtcgcgatagtcagtaatgcgcgtgaaatgcgggttggtcatgccaatctcttcgccctggtagatatacggcgttccctgcatgccatgcagcaccatcgccagcatttttgccgcaggcacgcggtattcaccttcatcaccaaagcgagaaacaatgcgcggctgatcgtggttacaccagaacaaggcattccatgctacgttgtgcattccttgttgccagtggcggaacaatgttttcaacgccacaaagtcaggtttagccagcgtccatttttcaccaccgggataatcgaccttcaggtgatgaaaattaaaggtcatgctcaattcactgcctgtcagagccgcgtatcgctggcaatgctcaaggctggtggaggacatttcacctacggtcattaacccgcgtggcgtaaacacatcgcggttcatctcgtgcaaaaactcgtgtgctcgtggcccgtcggtgtagaagcgacgcccgtcgccgtccaggtcttcagggaaacgcgggtctttggagatcagattcaccacatccaggcgcaacccgtcgaccccacgatcggcccagaactcacagacttttttcagctctgcgcgtaccgctggattctcccagttgagatccgcctgttctggtgcaaagagatgcaaatagtactgttcgctttccgcatgccagcgccacgcactaccgccaaatttactacgccagttgttcggtggcgtttctggttctccatcgcgccagatataaaactggcggtaagggctttctttgttcagcgcctcgcgaaaccaggcatgttgggtagaggtatggttaaacaccatatcgagaatgatacgaatcccgcggctttttgcctgcgtcaccagttcgtcaaaatcgtccagcgtgccgtaggtgggatcaatcgccgtatagttcgctacgtcgtaaccgttatcgacctggggagagacataaaagggggttagccagatggcatcaacgcccagtttatgcagatagtccaggtgttggataacgccacgtaaatcgccggtaccgctacccgtggtgtcctgaaaactctttggataaatctggtagataacgccgttttgccaccagtggggaagatgagtcattacgttattcctgcgaatgcgagggggcgcaattgcgccccgaagaaaattaaacaatgtccagcgtgcccaggcggtatttccgctgatagataaagctggtgagtacaatcgggatgatgatggcgatagccattgccagcgcaaacacctgccagtagctcggttgaatgctgagaattcccggcaggccgcctacgccgatgccattcgccataacgccgttcaggccgcatagcaatcctgccagaccagaaccaatcatcgcgcacagcatcgggaagcgatatttcaggttgatgccgtacattgcaggctcagtgaccccaagccaggcggagatagcggcaggcacggagatctcgcgttcattgtgcttgcggctggaaatgataatgcctatcacggcggagccctgagcgatattgctcagcgcaatcagcggccacactggcgtaccacccatgctttgaatcatctgcaaatcaatagcaagcgtggtctggtgtacaccggtgatcaccagcggggcgtacaggaagccaaacaatgctgcgccaatcggagcaaagctgccggtcatcaggtgacgtaccgcaaaggcaacgccatcgccaatcatgcgaccaaacggaccaatcagcgcatgggcgaggaacaccgcgaggatcaggctacagacgggtaccaccaccagatagaggtaatccggcacgatgcgtttaaggcgagtttcaataacgcccagcgccagtccggctaacagtgccgggatcacctgcgcctgatagcctactttggcgatgctgaacatgccaaagtcccacacttccggcagctgctgcccgagcagataagcgttcatcagctgtggagaaaccagtgtcacgccaagcacgataccaaggatcggcgtgccgcccatttttttcaccgcactccagcaaataccgaccggcaggtagaagaagatcgcttcaccgatcaaccacagaaaatcgtagatcgtttgcagggaagggtacatttgcgccagcgtctgaccgttgctcatgggcaaatcgccgatcacattgcgaaaaccgaggatcaaaccgccgctaatcaacgcgggcagcaacgggaagaagatcaccgcgaaatgagagatcaactgctcatgccatttcatattatgccgggcggctttttttacctgctctttatcaacctgcgcctgtccggtactcgcaatcagtgcttgatagtaatcacccacgttggtgccaatcaccacctgaaattgcccggcattggtgaaacagcctttcaccatagggagttgctcaatttctttcggtctggcattggccggttggttgaggacaaagcgtaggcgagtaatacagtggctcaccgtcgcaatattgccgcgcccgccgaccagttcaatcaaccgatcgatatccgtttggtttattttgctcatcataaagccccatggcagatgacatttttggttggctgcagaatatattgcgcggaaaaatttaaaaacgggaacgttcccgaaacgcagcgaagatcacaatttatcgttcaggaaacgatcaggacagggtggcggggatgatgatttgttgcggttcgctgcgcccggttacctgcgcgatcaactggcaagccgcctggcgtccagcttcggcgtaaccgggatctacggttacgatctccggatggaggaatttcattaacggcgtattaccgacgctcgccagttgcaaggtgtcgatgcgttgctcttgcaggtatttacttgcgccaagtgccagcgtgtcggttgcgcacagtaaggcggtagtttcaggcgtaatcacttttgcaacgttctcatagccttgcttcatagcaagccctggcagggcggcaacgggatgcagtttatgcgctttgcagaacgccaggtaggcttcgtgacgtcgcttaccggttgtcacgtcactgtgcggcacgccgagataactgatattacgatgcccctggtcatacagccgttgcatcaggattttgattgccccttcgtcgtcataacagacgctagcaaagccttttgcgtcacgcgccagcagaaccaggctactctgccagtgggctaacatttcttctgttatgccagtaaaaccgaacagcactacgccgtcgatattacgccgtttcagcactcccaaatgttcggcaactaattgcggggaaaactgactttccatcatgattgggtcgtaaccttgttcatagaacgctggcagcatggtttgaacggcgagattttcactcaagctatccagacgggtaacaatgatggcgaccactttatcgctttgcccacgcatagcgcgcgcagagcgggaaggggaaaatccatgctgattcatcactgcttcaacacgctcgcgggtgagctggctcacgccgctttcgttattcagcacccgggaaactgtagatttccccacgccgcttaagcgcgcgatatctttgatggtcagccgattttgcatcctgttgtcctgtaacgtgttgtttaattatttgagcctaacgttacccgtgcattcagcaatgggtaaagtctggtttatcgttggtttagttgtcagcaggtattatatcgccatagatgctacgaatattattggattctccttattatttgcggcgcttttttcacttaccggaggttatatggaacctgatcccacgcctctccctcgacggagattaaaacttttccggtaagcccgtcttttcacggcgttaccggatgcgtaaggccgtgacgttttaacgtccctgctcagctttattaccttcaggtaaggcttcgccacgcctgaagacatttctgtactgtttcagacagtgcggagggactccttatgtttaaagaaatttttacccggctcattcgccatttaccttcccgtctggttcatcgtgatccattgcctggcgcgcagcagacagtgaatacggtggtcccgccgtccttaagtgcgcattgcctgaaaatggcggtgatgcccgaagaagaattgtggaaaacgttcgacacccatccggaagggttaaatcaggcggaagtggaatctgcccgcgaacaacatggtgaaaataaattacccgcacaacaaccgagcccgtggtgggtacatttatgggtctgctatcgcaacccctttaatattttactcaccattctcggcgctatttcttacgccacggaagatttatttgctgcgggcgttatcgcgctaatggtcgctatttctacgttgctgaactttattcaggaagcacgttccactaaagcggcagatgccctgaaagcgatggtcagcaatactgcgacggtgctgcgcgtaattaacgacaaaggcgaaaatggctggctggagatcccgatcgaccagctggtgcccggcgatattataaaactggcggcgggagatatgatcccggcagatttacgtatcttgcaggcgcgggatctgttcgtcgctcaggcgagcttaaccggtgagtctctgcccgtagaaaaagccgctaccactcgccagccggagcacagcaatccgctggagtgcgacacgctgtgttttatgggcaccaccgtggtgagcggcacggcacaagcaatggtgattgctacaggtgccaatacctggtttggtcaactggcggggcgtgttagtgagcaggaaagcgagccgaatgcctttcagcaagggatcagccgcgtcagtatgctgctgattcgctttatgctggtgatggcaccggtggtgctgttaatcaatggttacaccaaaggcgactggtgggaagcggcgctgtttgcgcttagcgtcgcggtaggcctaacgccggaaatgttgccgatgattgttaccagcacgctggcgcgcggcgcagtaaagctgagcaaacagaaagtgatcgtcaaacatctggatgctattcagaactttggcgcaatggatattctgtgcactgataaaaccggcaccctgacgcaggataaaattgtgctggagaatcataccgatatctccggtaaaaccagcgaacgcgtgctgcatagcgcgtggttgaacagtcattatcagaccggacttaaaaacctgctcgatacagcggtgctcgaaggtacggatgaagagagtgcgcgcagcctggccagtcgttggcaaaaaattgatgagattccgtttgatttcgagcgtcgccggatgagcgtggtagtggcagaaaataccgagcaccatcagctggtttgcaaaggtgcattgcaggaaatcctcaatgtgtgtagccaggtgcgtcacaatggcgagattgtgccgctcgatgacatcatgctgcgtaagattaagcgggttactgatacgctgaatcgtcaggggctgcgcgtggttgcggtggcgacgaaatacctgccagcgcgtgaaggagattaccagcgggcggatgaatccgacctgatcctcgaaggatatattgcttttcttgatccgccaaaagagacaaccgctccggcactgaaggcattaaaagcgagtggaattaccgtaaaaatccttactggcgacagtgagttagttgcagcgaaagtgtgccatgaagtggggctggacgcgggagaggtggtcattggtagtgatattgaaacgctatctgacgacgaactggcaaatcttgcacagcgtaccacgctgtttgcccgcctgacgccgatgcataaagaacgcattgtgaccttactgaagcgcgaagggcatgtggttggctttatgggcgatggtattaatgatgcgcccgccttacgcgctgcggatatcggcatttctgtggacggcgcggtagatattgcccgtgaagcggctgatatcatcctgctggaaaaaagcctgatggtgctggaagagggggttattgagggacgtcgcactttcgccaacatgctgaaatacatcaaaatgacggcgagctctaacttcggtaatgtgttcagcgtgctggtagcgagtgctttcttgcccttcctgccgatgttgccgttacacttgcttattcagaacctgctgtacgatgtgagtcaggtggcgatcccgtttgataacgtcgacgacgagcaaattcaaaagccgcagcgttggaatccggcggatctggggcgctttatgatcttcttcggaccgatcagcagcatcttcgatattttgacgttttgcctgatgtggtgggtattccatgccaacacgccggaaacgcaaacgctgttccagagcggatggtttgtggtgggcttactgagccaaacgctgattgtgcatatgatccgcacccgccgtgtgccgtttattcagagctgtgcaagctggccgttaatgatcatgaccgtgatcgtgatgattgtcgggatcgcattgccgtttagtccgctggccagttatctgcaattacaggcgctgccgttaagctatttcccgtggctggttgcgattctggcagggtatatgacattaacccagttggtgaaagggttctatagccgtcgttacggctggcaataaagaataaactgggcacgatagccccgattcagattgtagacaaagtgagttttgttcatgccggatgcggcgtaaatgccttatccggccaacaaattcaataaattgcaggaatcacgtaggcctgataagcgtagcgcatcaggcgattttgcgtttgtcatcagacttaatccgggcatgatagcccggatttccatcaagattagcgacgaacagcgatcgcttcgatctcaatcttcacgtctttcggcagacgggcaacttcaacgcaagaacgtgccgggaaggtggcgttgtgttcggtgaagaaggcttcgtaagtggcgtttacggttgcgaagtcgttcagatcttttacaaacacggtagttttaacgatgtcgcccactttcaggccagcggcttcgacgatcgcttttacgttatccaggctctgacgtgcctgtgcagcgacgtctgccggtacttcgcccgttttcggatttaccgggatctgaccggaggtgatgatcatattgcccagatcaacgccctgtacgtaaggaccgatagctgccggtgcattttccgtcgcgatagttttgctcatgatttctcctttattacagcggtaaaaagtctggctcattatagggagccagacttttattaccaaccgcaattaattggccagcaccacattatgggaaaactctttttcacagtatttgcatttgagcgcgatatcattggcgcgttttcgcacggcaaagctggaactaaccggttcggcatggctgatacagttgctgttcgggcagaccagcacattgtcgatgcgctccggcagacttgggcggcttttacccaccacttcatagttgtcgatacggttaaccgtggcttgcggcgcatacaatgccagttgatctacttgatcttcactcaaaaaggtattttcgattttgatcagatctttgcggcccatctcgccagaaggcaggttcagaccaatggtgatgcgctgatccgtttcggtcagcttgaacagactcaacagcttaaaaccgatctgggcggggatatggtcaattaccgtgccgcgtttaatagcttcaacctgcaatttattatcgtgtgtcatctctatttccccttacagtaccagatcgcgattcagaaccagtgccagtaacgcctggcgagcgaaaatcccgttgcctgcctgctggaagtaccaggcgtgtggcgttttatcaacatccgtcgcaatctcatcaacacgcggcagcggatgcagcactttcatattggctttggcgttgtggagatcgctggcgcgaagaacaaactgcgctttcacgttggcgtactcggacgggtccagacgctctttttgcacgcgggtcatgtacaggatgtctacttccgccatcacttcttcaatagagctgtgcagactccatgcgatccctttttcatcgagcatatccagaatgtattgcggcattgccagcgcgtccggcgcgatgaagtaaaaacggttgccgtcgaacttcgctaacgcctgagtcagggagtgaacggtgcggccatatttcaggtcaccaaccattgcgacgtggagattgtccagacgcccctgggtttcctgaatagtgaataagtccagcaaggtttgcgtcggatgttggttggagccatcaccggcattcagtaccggtacattgccggaaaactcggtggccaggcgcgccgcaccttcctgcggatgacgcatcactatcgcatcgacgtaagtgctgataacgctaatggtatcggccagcgtttcgccctttttacccagacttgtattggcgctgtcggagaagcccaccacgctggcccccaggcggtgcatagatgtttcgaaagagaggcgggtacgggtagaggcttcgaagaaacagctggcaatgactttgtgcttcaacagctctggttgcgggtttgctttcagtttcgccgctgtcgccagcaccagattaaggtcatcgcgactaaggtcgtttatggaaatgatatgtttctgatatagcggattagccatcttttatctcctgacgcctgggcaaaaaaaagcccctcgattgaggggctgggaatgggtgatcaacgggaagaaaaacggcaggccagcgtcttttttcagacgcggtaagacaaaatgtcgaacacactgaaccatacatcctcccggcaaattgtccggcattatactcatcgtcagaagcggcgcaagcatttgatgcaatattttgtcagcgcaaacggtttatttgaattaaaagtcaaggtatatgcatttttatttgatgtgattctgcaggggaactgtccttcggtatcaataattgcagacattccctgctttttcctttttcactttcacgcaatcagatatgcattttattccattcatccgacttatagggcggagtgtgaaagcgaacggctaacactattgcttactgctcagggatgcgcgctatcactttaatttcaaaatcaaagcctgccagccatgtaacacccaccgccgtccagtttggataaggtggggcgctaaatatttcatttttcaccgtcatgatgtcttcaaattggttttctggatcggtatggaagctcgtaacatcaatgatatcgtcaaaagtgcatcccgcagctgccagggtcgcatgcaaattatcaaatgccagtctgacttgttgctgaaaatcgggttctggtgttccgtcctctcgacttcctacttgcccggaaacaaacagcaaatcgccggaacgaatagccgcagaataacgatgctcagcatatagactatgtcggccagcagggaaaacagcggttctttctaccatttggttatcctcaagatttacgacatgaacagaagatttctctttaccgggagccgcttttagcggacgacgtgagtaaacaaaacccagacatcatggataatggctgggcttaattgagcgtagtcggttatgcgccaaacgcgccatcaatggtatgcatcgcgccggtaacaaaactggcttctggccctgctaaccatgcgaccataccagcgacctcttccggttgcccatgtcttttgatagccatcaaactatgcaacatatcgcgcattggcccgttggcgggattagcgtcggtatcaattggccctggctggacgacgttaatggtgatcccacgcggtccaaaatcacgggccagcccgcgcgccatgccttgcagggcagatttgctggcggcataagcagccatgcctgcaacaggcatacgatcgccattcacggagccgatgattaagatgcgcccgccttcgggcatctgccgggcggcttcaacagaggcatgataaggagcatgaatattgattttgaaaaggcgatcaatatcgtcggcatttaattccagggcctcgccaaagacgccaatacctgcatttaccaccaggatatccaatgcgccgctcttacgaacgacatcaatgacagcgtctctgtcagcactatctgtgaatactgctgtcgctccagtctcttgtgccaggcgtttagcggcatctttgctccccgcataggtgaatcgtacattggccccatcggtgacgaaacgacgtacgatagcggcaccgataccacgactgccaccgaggatgagaactgtcttacctgtaaaagcgcccataaggactccttgatttattatgtaacatgcattacaaaactgttttaactttctgtcaacaggttttgtaatggtcactaaaaaacaatctcgcgttccaggtcgtcccagacgtttcgctcctgagcaggcaatctctgcggcaaaagtgctttttcaccaaaaaggtttcgatgctgtcagtgttgctgaagttactgattatcttggtattaaccccccgagcctctacgcggcttttggcagtaaagctgggttatttagccgtgtactcaatgaatacgtcggtacggaagctattccgcttgccgatattcttcgtgatgatcgtccggtaggcgagtgcctggttgaggtattaaaagaagcggcgcgcagatatagccaaaacggcggctgcgctggctgtatggttcttgaaggtattcatagtcatgatccacaagcgcgtgatattgccgttcaatattatcacgccgcagaaacgaccatttatgactacatcgccaggcggcatccacaacgcgcacaatgtgtgactgattttatgagtaccgtgatgtctgggctttctgcgaaggcacgagaggggcactctatagaacaactctgtgcaacagctgcaatggcgggggaagcgataaaaactattcttgaggagtgatgcgggccttgacccgaaaggcgggaaagcgcctgccgataagttgtgataagacaataattcacgcgttaaggctagcggaattgattatcttttcgtataacgatagaaatgaaacgttgttttaattaaggagtggaaaagatgatcatcggaaatattcataatcttcagccgtggctaccccaggagttacgccaggcgattgagcatatcaaagcacacgttacggcagaaacgccaaagggcaagcacgatatcgaaggcaatcgactgttttatcttatcagcgaagatatgaccgagccgtacgaagctcgccgtgcggagtaccatgcccgctatcttgacattcagattgtgttaaaaggtcaggaaggcatgaccttcagcacgcaacctgcaggcgcgccggataccgactggttagctgataaagacatcgcatttttgccggaaggcgttgatgagaaaacagttattctaaatgaaggtgattttgttgtgttttatccgggggaagtgcataaaccgctgtgcgcagtgggcgcgccagcccaggttcgcaaagcagtagtgaagatgctgatggcgtgatgacttttcgccgtaaataactcaaggtttacggcgagtttgtgaaaagagcgttttttgatatttttttgtgagtaaaatttgtaatgcttagacgttcttattcactcaaggagttcgtcatgagcaaaataagtgatttaaattattctcaacacattacattagccgacaattttaaacaaaaaagtgaagttttaaatacctggcgtgttggaatgaatgattttgcccgtattgccggggggcaggataacagaaggaatattctttctcctggagcatttttagagtttttggcaaagatatttaccctgggttatgtggattttagcaaacgctccaacgaagcgggtagaaatatgatggctcatattaagtccagttcttattctaaagatactaatggcaatgaaaaaatgaagttttacatgaataatcctgtaggggaacgagcggatagtcccaaggtgattatagaaattagtctttccactatcactactatggggactcgtcaaggacatacagccattatatttccacaacctgatggtagcactaaccgttatgaagggaagtcctttgaaagaaaagatgagagtagtttacacctgattactaacaaggttctggcgtgttaccaaagtgaagctaacaagaaaatagcgcgtctattaaataataatcaggagttaaataatctacagaaattaaataatctacagaagttaaataatctactgaagttaaataatatacaggggttaaataatcctcaggagttaaataatccgcagaatttaaatgattctcaggagttaaataacagccaggaattaaatagtccacaggagttaaatgatccgcaggagttaaataattctcaggacttaaataactctaaggtgagttgtacagttagtgttgattctacgattacgggtttattaaaagaaccattgaataatgcattattagcaataaggaacgaacatctgctattaatgcctcatgtatgtgatgaaagcattagttacttactgggcgaaaaaggtatacttgaagaaatagataagctctacgcattaaatgatcacggaattgataatgacaaagtaggtaacaatgaaattaatgacatcaaagttaacctgtctcatattcttattgattccttagatgatgcaaaggttaaccttacaccggtcatcgatagcattctggagacttttagtaaatccccatatattaatgatgtaagaatactggattggtgttttaataaaagcatgcaatattttgatgatactaaaaagataaagcatgcatgctccgtaataaatcatattaatcttcgcagcgatcagtctaaaatagctgagacattatttttcaatctcgataaagaaccctataaaaatagccctgaattacaggggttgatttggaataagttggttgtatatgtcaatgaatttaacttaagtaatcgagaaaaaacaaatttaatacaaaggctatttgataatgttgagtctatatttaatgaagtacctgtcagcattttagtgaatgatatttttatgaatgatttctttatgaaaaatcctgagatgattaattggtacttccctcagttacttaagagttatgagggtgaaaagatttattttgataatttaaaatatgatttaaatgataatgataaggaatctaataaagaaattttgaagaatcaaccagataatgttatcaaagaaaaactgaataatgaatacaaacttagatttagaatgatgcaaactatcttgcaaagcagagttaatgtattaccatatattaatgaacagcgtttaaataaactaaatccaccggaaaatttacgtatagcaatagaacactttgggtggaagaatagacctatcactgcataaaataatgtgatgccgggatggtttgtatttcccggcatctttatagcgatagcaattatttactgagcgtcgcgaccatcaccgctttgatagtatgcatacggttttccgcctgatcaaaaacaatgctggcggcagattcgaagacctcatcagtgacttccataccgccatgtaggccaaattcttccgccattttcttgccaagcgtcgtttggtcgtcatgaaacgcgggcaggcagtggaggaatttgacctccgggttaccggtcaactgcatcatcttgctgttcacctgatattcacgcagcaatgcaatccgttccgcccatttctcttttgcttcccccatgctcacccacacatcggtatagataaagtcagcaccttcaactcccttcgcgacatcttcagtcagcgtaatattcccaccattttgctgtgccagggcgcggcattccgtaaccagcgcagcttccggccagcacgcttgtggcgcgaccagacgcaaatccagaccggtaagcgccgcagcttcgagcatgctattgcccatgttgttacgcgcgtcacctgcatagaccagcgtcatttcgttgaacgctttgccgggcaaatgctcctgcatggtgagaagatccgccagcagctgcgtgggatggaactcattggtcaggccattccataccggcacgctagcgtattccgccagtgtttcgacaatctcctgaccatagccgcgatactgaataccgtcatacatgcgaccaagcacgcgggcagtgtctttaatgctctctttatgaccaatctggctgccgcttgggccgagataagtaacgcgagcaccctggtcatatgcggcaacttcgaaagagcatcgggtacgagtgctgtctttttcgaagatgagcgcgatgtttttaccagtgagtttggcttcttctttaccgcttttcttatcggctttcagcttcgcggctaactgcagcaggctgttgagttcagctggcgtgaaatcgagtaatttcaggaaatgcttatgataaaacccggacatagatccctcctgtggctaacgcctcaatgaattaaaattcaatttatatggatgattattcatttgcaagtctaaagcataaatctttgtcacaaaggtggaggcaatgtcagtggtgtgtgacaataagagtatcggcaggacattaagaggaatgagccatggcaaacccggaacaactggaagaacagcgtgaagaaacacgtttgattattgaagaattactggaagatggcagcgatccggacgcgctgtacaccatcgaacaccatctttccgcagacgatctggaaaccctggaaaaagcagcagttgaagcgtttaaactcggttacgaagtgaccgatccagaagagctggaagttgaagatggtgatatcgtgatttgctgcgacatcctcagcgagtgcgcgttgaatgccgatctgatcgatgcccaggttgaacaactgatgacgctggcagagaaatttgacgttgagtacgacggatggggcacttactttgaagatcctaacggcgaagatggcgacgatgaagattttgtcgatgaagacgatgacggagttcgccactaattaagcgtagcgcatcaggcccaggtagttcctgcaacctggtgaatttgtagcccggataaggcattcatgtcacatccggcataaacaaaacgtacgttgttaatgttcgaatgcccgcgagttgaacacgcgggcatttttttagagttcgcgcaacatccgcacttcacaatcgacatggcccgtgcagccaagcgcatagtcgatatgctcaaagcccaaatgctcataaagcgcaatggcttcctttaaaaaagcggtcgtttccagatagcagcgtttgaaacccatctctcgcgcctgctccatcgccattaaggccagtttttttgccagccctttgccgcggatagccggaagaaaatacatcttttgcagttcgcaaatatcgctctcactcccggttaatggcgctatcccaccgccgccgaccacttcaccctcgtactcaacgacccaatatgcatggccaggctgactatatacttgatacagctcgtcaagattcggatcggcgacggtgtagcctttatcagcggtaagaccgtattcggcggatacctgacgaatgacgcgggcgatagcaggattatcctgcagcgtcaggcgacgcattacaggactttgcggcgcaatgttattcatagtttaacccaataaaaataaagtaattatacatttgtttaataccactctcttcttacgtacgcaagcgacttataaagtaataaagtttttgccagcctattactgataagagtattgtaacgtggcagaacattttactgtctgtatatataagttatatcaatggattttttaattcagggaatttttatggctcaagttattaatgaaatggatgttccgtcccatagctttgtttttcatggtacaggtgagagatattttcttatttgtgtggtgaatgtgttgttaacgattataacgctaggtatctatttaccatgggcattaatgaaatgtaagcgttatctttatgctaatatggaagttaacggacaacgattttcttatggaattaccggtgggaatgtttttgttagttgtcttttttttgtttttttctatttcgcaatcttaatgacagtgagtgcagatatgccgcttgttggttgtgttttgactttgttactgttggttttgcttatatttatggcagcaaaaggactgcgtcatcaggccttaatgaccagtctcaacggcgtaagatttagttttaattgctctatgaaagggttctggtgggtgacctttttcttgccgattttaatggccattgggatggggactgttttctttatcagcacaaagatgctacctgccaatagtagtagtagtgttattatatccatggttctgatggcaatagttggtattgtttccattggtatttttaatggtactttatatagtctggtaatgagttttctctggagtaataccagtttcggtatacatcgtttcaaggtgaaattagatactacgtattgtataaaatatgccattctcgcatttttagctttattgccttttctcgctgttgctggttatattatcttcgatcaaatattaaatgcgtatgatagttctgtatatgcaaatgatgacattgagaatttacagcaatttatggaaatgcaacgtaaaatgataatcgcgcagttaatctattattttgggattgctgttagcacaagttatttaacggtgtctttgcgaaaccattttatgagcaacctgagtctgaatgatgggcgtattcgttttcgcttaactttaacgtaccacggtatgctttatcgcatgtgtgcgttggtggtgatatccgggattacgggcggtctggcttatccactgctgaaaatatggatgattgactggcaggcaaaaaatacgtatttgctgggcgatttggatgaccttcctttaatcaataaagaagaacaaccagataaaggcttcttagccagtattagtcggggagttatgccttctttaccatttctgtaagagataaaaaaggccggagcatgctccggccttcgttttcatcactgtgttttgattacagcgcggcgataacagcctgctgttcaatcagtttcgctttcgcttccgcatagccttccagcttctcacgctctttcgcgatgaccgcttccggtgcgcgggcgacaaagccttcgttcgccagtttgttctcgatacggctgatttcaccttcaatcttcgccacttctttcgccagacgcgccagctcatcttctttgttgatgaggccagccatcgggatcagcagctctgcaccgtcgatgatcttcgtaacggaaaccggacctttgtcatcggcaggcagcacggtgatactttccagacgcgccagggtttgcaggaagccacggttttcatttacgcgacgttctgcatccgcgctgcaaccacgcagcagcagctccagcggtttgcccggcgcgatgttcatttctgcacggatgttacgtaccgcaacgatcgcctgtttcagccattcggtgtcggccagtgcggcttcatcaacctgagatgcatcgtactgcgggaacggctgcagcatgatggtgtcggcagtgataccgcaaagtactttcacacgctgccagatggtttcggtgatgaacggaatgatcggatgcgcgaggcgcagcagaccttccagtacagtcaccagcgtatggcgagtaccgcgcagttctgcttcggtgccaccgttcattaccggcttggtcagctcgagataccagtcacagaactggttccaggtgaactcatacagaatgcctgcggcgatatcgaagcggaagctgtccagcgcttcgcggtacgctttgatggtctggttgaactccgccagaatccagcggtccgccaggctcagcgtcatttcgccgccgttgaagccgcaatcctgaccttctgtgttcatcagcacaaagcggctggcgttccacagcttgttacagaagttacggtaaccttccagacgcttcatatcccagttgatgtcacgaccggtagacgccagcgccgccagggtgaagcgcagcgcgtcagtaccgtgcggctcaataccgttcgggaactgcttctcggtgcgcttacggattttgtccgccagctgcggctgcatcatattgccggtacgtttttccagcagttctggcaggctaataccgtcaaccatatccagtgggtcgataacgttacccttggatttggacatcttctggccttcgtcatcacgaatcaggccggtcatgtaaacggtgtggaacggcacctgcggtttgccattttcatctttgatgaagtgcatggtcatcatgatcatgcgggcaatccagaagaaaatgatgtcgaaaccagataccatcacgctggttgggtggaactgacgcagggcgtcggtattttccggccagccaagggtagagaaggtccacagcgcagaagagaaccaggtatcgagaacgtcttcgtcctgacgcaggacaacatcagcaccgaggttattttctttacgcacttcgtcttcgttgcggccaacataaacgttacccgcttcgtcataccatgccgggatacggtgaccccaccacaactgacgagagatacaccagtcctgaatatcgcgcatccaggagaagtacatgttttcgtactgcttcggtacgaactgaatgtcgccgttctcaaccgcttcaaccgccggtttcgccaggacatcggcacgcacgtaccactggtcggtcagcattggttcgataactacgccgccacggtcgccgtaaggaacggtcaggtcgtgcggtttaatttcttccagcaggccaagcgcgtcaactgcggcaacgactgctttacgtgcagcaaaacgctccagtttctggaactctgcagggatttcgctggaataaacgtcagattcgttacctttggtatcgaacacctgggcgctttcacggatatcgccgtcaaaggtcaggatgttgatcatcggcagggcgtgacgtttacccacttcatagtcgttaaagtcgtgcgccggagtgattttcacgcagccggtgcctttttccatgtcggcgtgttcgtcgccaacgatcggaatacgacggttaaccagcggcagaatgacatatttgccaatcagatctttgtaacgcggatcttccgggttaacggctacgccagtatcgcccagcagggtttctggacgggtagtcgcgaccaccagataatctttaccgtctgcggttttcgcaccgtcagccagcggatagcggatgtgccacatgctacctttgctttcgcggttttcgacttccaggtcagagatagcggtgcgcagtttcggatcccagtttaccaggcgtttgccacggtaaatcaggtcttctttatacagacgaacgaaaacttctttcaccgcattggacaggccttcgtccatggtgaagcgttcacgctcccagtcgacggagttgccgagacggcgcatctgacgggtaatggtgccgccagattccgctttccattcccagattttgtcgatgaaagcttcgcggccgtagtcgtgacgggttttaccttcttctgcggcaatcttgcgctcaacgaccatctgggtagcgatcccggcgtggtcagtaccgacctgccacagggtgtttttgccctgcatgcgctgatagcggatcatggtatccatgatggtttgctggaaggcgtgacccatatgcaaactgccggtgacgttcggcggcgggatcatgatgcagaaactttcctggctttcatcgccattaggcttaaagtagccctgcttttcccagtgctcgtaaagcggctgttcgatatcttgtgggttatatgtcttttccattatttccaggttgccgtattcaggttgaaaccagccacgcggtaggctttatagcgttcgcgcgccagttgtttcagagaatcttcataaggaacgaagtctaccacttctgtgaaagcggtggcaaaatctgcaaagcttgttcgcagactaatcaatatatcgcgccggctgctgctacgcttttgcggccaggcgatctccaccggtgcaccgccgcgcggtccttctcccgctaaattatgcggaacaaagctttctgccggacgcgcccacagggcttcatccagccggtaagcctgcttttcatcttcacaggcgatgagcacgcgcttaccgctgcgccaacgttctgcggcaatttcacacaccagttgctcaacggcgcttaagccatcgacggtggtgtcattgtccagaaggtagaacgtcgcgtttttcataaatggggcttcttgtggtggatttaaatacgcatcaggtatacaccgcagcgcctgatgcgacgctgttgtgtcttatcaggcctacgagttcagtgctgtgtaggtcggataaggcgttcacgccgcatccggcaataacagccttgcctgacgcaattactcttcgccgttaaacccagcgcggtttaacaggaactgtgccagcaacgctaccggacgaccggtggcgccttttgctttaccagaacgccaggcggtaccggcgatatccaggtgcgcccagttgtacttacgggtaaagcgactcaggaagcaacctgcggtaatcgccccaccaggacgaccgccaatgttcgccatatcggcaaaattggactccagttgttcctgatactcgtcacccagcggtaagcgccatgcgcggtcaccggattgttcagacgcggcaatcagttcatgggccagcggattatggttcgccatcagaccagtaatatgatgacccagcgcgatcacgcaggcaccggtcagcgtcgccacgtcaatcaccgcttccggctcaaaacgctcaacgtaagttaacacgtcgcacagtaccaggcggccttcagcgtcggtgttcagcacttcaacggtttgaccggacatggtggttaacacatcgcccggacgataggctcgtccgccaggcatgttttcgcagcctgccaacacgccgataacgttaatcggcagttgtagctccgcgaccatccgcatcacgccgtaaaccgctgccgcaccgcacatatcgtacttcatctcatccatgccttcactaggcttgatgctgataccgccggagtcgaaggttaaacctttacccaccagcacgattgggcgtgcatcttcgctcgcgttgcctttgtactcaatcacgctcatcaggctttcgttttggctaccctgaccgaccgccagataggaatgcatccccagctctttcatctgctgttcgccgataacgcgggtgatgacattcttgctgtagctgtcagccagctggcgcgcttgactagcgaggtaagcggcgttacagatattcggcggcatattgccgagatcttttgctgctttaatcccggcggcaatcgccagaccgtgctggatcgcgcgctcaccgctggtcagttcacggcgggtcggcacgttgaacaccatcttacgcagcggacgacgcggttcgctcttgttcgttttcagctgatcgaaactgtagagcgtctcttttgccgtctcgacagcctgacgcactttccagtagttgttacggcctttaacgtgcagctcagtcagaaagcagaccgcttccatactgccagtatcattcagcgtattaatggttttctgaataacctgcttgtactgacgctcatccagctcacgttctttgccgcaaccaataaggagaattcgctcggaaagtacattcggaacatggtgcagcaacaatgtctgccccggttttccttccagttcgccccgacgtagcagggcgctgatgtacccatcgctgattttatcgagctgttctgcaatcggagaaaggcgacgtggttcgaagacgcccacgacgatgcaggaactccgctgtttctccgggctaccgctttttacactaaactccatgcactacgctcctgaatcttaaagacaacggcggtggctacagatagaattgcaagctttcgtaactcatgtccgctgttgcgatgacttcgtgttaatcttaacgttattacggcattggcacgtcagaacaaaatctgagaggtgaatccgttgagtataattatcttagcgacgatttcgacgactcaagagaataaatgacgtttaagccatgaaacaagctaaaatcctgcaaaagacgagtttttacgggcgtatttaaagtgataatcataagatatctggtgcgggagacgctcaaaagccagctggcgatactcttcatcttgcttttgatcttcttctgtcaaaagttagtgaggatcctcggcgcagcggttgacggcgatattccggcgaatctggtgctctcccttctcgggttgggcgtgccggaaatggcgcagcttatcctgccattaagcctgttcctcgggctgctgatgacgctgggcaaactgtataccgaaagtgaaattacggtaatgcatgcctgcggcctgagcaaagcggttctggtgaaagcggcaatgatccttgcggtattcacggcaatcgtagcggcggttaacgtgatgtgggcgggaccgtggagtagccgtcatcaggatgaagtgttagcagaagcgaaagcgaaccctggcatggcggcgctggcgcaagggcaattccagcaagcgactaatggcagcagcgtgctgttcatcgaaagcgttgacggcagcgatttcaaagatgtgttcctcgcgcaaattcgaccaaaaggtaatgcacgtccttctgtggtggtggccgattccggacatttaacccagctgcgcgacggctcccaggtcgtcactctcaaccagggaacgcgcttcgaaggcactgcattgttacgtgatttccgcattacggacttccaggattatcaggcgatcattggtcaccaggcggtggcgctcgacccgaacgataccgaccagatggacatgcgcacattgtggaacactgacaccgatcgtgctcgcgcagaactgaactggcgtatcacgttggtattcaccgtgtttatgatggcacttatggtcgtaccgctgagcgtggttaacccacgtcagggacgcgtactgagcatgctgccagccatgctgctgtatctacttttcttcctgatccagacctccctgaaaagcaacggcggtaaaggtaagctggacccgacgctgtggatgtggaccgttaacctgatttatctggctttagcgattgttctcaacctttgggacaccgtgccggtccgccgcctgcgcgccagttttagccgtaaaggagcggtgtgatgcaaccttttggcgtacttgaccgctatatcggtaaaactattttcaccaccatcatgatgacactgttcatgctggtgagcctgagcggcattatcaagtttgtcgatcagctgaaaaaagccgggcaggggagttacgacgcgttaggcgcaggaatgtataccttgctgagcgtgccgaaagatgtgcagatcttcttcccgatggcggctctgcttggggcgttgcttggtcttgggatgctggcgcagcgcagcgaactggtggtgatgcaggcttctggttttacccgtatgcaggtggcgctgagcgtgatgaaaaccgccattccgctggtcttgctgacgatggcgattggcgaatgggtcgcgccgcagggcgagcagatggcgcgtaactaccgtgcgcaggcgatgtacggcggcagcttgctctctacccagcaaggcttatgggcgaaagatggcaacaacttcgtctacattgagcgggttaaaggtgacgaagagttaggtggcatcagcatttatgcctttaacgagaatcgtcgtctgcaatccgtacgctatgccgctactgcgaagtttgacccggaacataaagtctggcgtctgagccaggttgatgaatctgatctgaccaatccgaaacagattaccggtagccagacggtgagcggcacctggaaaaccaacctcacgccggacaaactgggcgtggtggcgctggacccggatgcactctctatcagcggtttgcacaactatgtgaagtatctgaagagcagcggtcaggatgccggacgttatcagctcaacatgtggagcaaaatcttccagccgctatctgtggcggtgatgatgctgatggcgctgagcttcatctttggcccactgcgtagcgtaccgatgggcgtgcgtgtggtcaccggtatcagtttcggttttgtcttctacgtactggaccagatcttcggcccgctgacgttggtttatggcatcccgccgatcatcggcgcactgttgccaagcgccagcttcttcttaatcagcctgtggctgttaatgagaaaaagctaaccgaatgaacgaataaagggagcgaaagctccctttattattgttagcaaagtgtgcttcgttcattcctgaaaaataattaaaattcaatatattgcagtggggtgggcatgataagacgcgccagcgtcgcatcaggcaaagacaaatctcgcctgacttaccttcttctcccccccagcaaactccccaacatcccgcgtacaatctgattcgtcacttggcgagcggcgcttttggccattgtttgcaccacaccatctttcttcccgccgcgtggtccggtagtgccgaacaaaatatccttcaatccaccaagaatgccgtcatccaccgctacctctttccctttcgcgggaggattattttgctgctcggtactggcctgaaagcctttttgcaacatctcataggcggattcccggtccacctcatcctcatatttgccatacaccggagagtgattaatcaagccattacgctcatcttccgtcaccggccccatccggctacaaggcgcgatcaccatcgcacgctccaccacagaagggcttcctttcgcatccagaaaagagatcaacgcctcgccggtgcccagttcctgaatcgccttttcggtatcaaacgccggattggcccgcatggtttgcgccgctgccttcactgctttctgatcttttggcgtaaaagcccgcaaagcatgttgaacgcgattaccgagctgcccgagcacattatccggaatatcagacgggttttggctaacgaaccagacgcccacgcctttactgcgaataagccttatcacctgctcaatcttatccagcagtacctgcggggcatcgttaaacagcagatgtgcctcgtcgaagaaaaacaccagttttggtttctccagatcgcccgcttccggcaattgttcatacaactcactaagcatccacagcaggctggcggcgtacagtttcggcatctgataaagtttctcggcgctgaggatattgataacgcctttaccgttggcatcggtgcgcatccagtctttgatatccagcatcggctcaccaaagaagtgtgctgcgccttgctgttccaggctcaacagcccgcgctggatggcaccaacgcttgcgctactgatattaccgtactgattctggaaggatttggcgttatcgccgatgtactgggtaattgcccgcagatctttaaagtcgagcagtaacagcccctgatcgtcagcaatgcggaagatgatattcagcacgccagattgcacatcgttgagattcaacagtcgtgccagcaacagcggccccagatcgctaaccgtcgcccgcaccggatggcctttctcgccaaagatatcccacaccaccaccggattggcatgcggttgccagtcattgacgccgatatttttaagccttgcgagcagtttttcgctcaccgttcctgcctgcgcgacgccggtcagatcgcctttcacatcagccataaacaccggcacgccgatttcgctcaaactctccgccagtttttgcagcgtaacggttttacccgtccccgttgcgccggtaatcagcccatgacggttagccattcccggcagtaaaaacagttctgtgtccggcgtgcgggcaattaacaggggttcactcatgagatatcctccagtttcctgcctggagtataggcaacgtccggcaaagagaatacgtgtaatgaagagaaaataacttaaagcgtgttgccgtgataaatctgatacccgaggtcaacagtgttgtggttgtgatcgttatttttaattttgctcagcaacatttgggcggccatccgaccaatatcaaaacggggagtaattacgctggcgaggcttgggatcatttgcctgccaatctccagcccatgaaaacccgcaatggaaatttgttctggcacggcgaggtttcgctcgcggcacagcagaagcgcacccatcgcaatatcgtcattggtgcaaaatacaccgtctaaatccgggtttgcgctaagggcatcacgcattaactgcattcctaaatgaatggaactgatggcgcgtggattcatgcgtaatggggaaagattatgcagcatcatcgcatcgcaatacccctgataacgctgttcatcgcgggtgtcatctttggaaccgagatacagaattttgtgcctgactcgcttctccagcatggtacacaccatgtcaaaagcggcctgccgattatcaaaaccgacctccatatccagccgttctccctgtacatccatcaattccacgaccggaatggtggcactacgcagaaatttcaccgtcctgatggtgtgatatttttcgctaagtataatcccgtcaatgttataagagagcaggttaatcacgctctcttcttcggaatcgcgatcgtaattgtaattagcaataagggtctgataattatgctcagaggtgacggattctattcccgcgagaatgtcagcgaagagttgattttgaaaactcggaatcaagataccgagggtataactttgtgcattcaacaacatgccgggagcgcgattagggatataattgatctcttccataattttggcgatgcgctcgcctgtttcctttgccacctttttcgggctgcggatataacgactcacggtcatttttgttacgccagccagcgtagcgatatcctgtaaagaaattctgtgattgcgcataacttctcccaacgtcgggggaatcttcaatcttcccccgaaactacatcacaatattttattctttcagtgcaatacggcgttaatggctaacacgcccagcaaacccataatagaaataagggtttccatcaccgtccaggtacgcaacgtttcaccaaccgtcagattaaaataccctttaaatagccagaagccagggtcgtttacgtgactcgcgatcacgctgcccgcaccggttgccagtaccattaaagcgggatcggcatgggtaacgttgataatcggcaacaccacacccgcggtggtaatggccgcgacggtggcagagcccagagcgatacgcaacagcgccgcaacagtccagcacatcaataacgggctaagtgtagttccggtcattaagtgactaatatagtgcccgacaccgctatctactaatacctgcttaaacgcgccgccgccagcgataataaacacaatcatcgcgatagcgcctatagaatccccaatgatatccatgatttgctcgatggtgcgtccattacgtcggcccagtgtgaaaatcgcaataacaatggcaataaacagcgcaacggcagggttaccgacaaattcaaagaagaggcgcacggtgttagttttcggtaacgtaatttcacaaacggcggcgatagccatcaggatgaccgggatcacggcagcgaaaatactgttccagaaggagggcatctcctcttcgctaaacagatgaggattaaataagccttccggtggtgctttctcaaagcgagttagcagtttagaaaacagcggtcctgcgacaataactgtcggaatggtaatgataaatccatacagtaaagtcgttccgagattagcctcaaagatagtcgcgatggcagtaggccctggatgtggcggcagaaaacagtgggttacagagagcgctgctaccattggtacgccaacatacaacaggggtaatccactacttgctacgatggtaaataccaacggcaacagcaggacaaaacccacttcaaaaaacatggcgaggcccacaaccagaccggtgatcactagcgcccattgcacgcgttttttaccaaaagtagcaatcagcgtagtggcgatacgttgtgccgcacccgtatcagaaatcagcttgcctaacatggccccgaaaccgaggatcattgccagcccgccgagcgtgctgccgataccattttgtatagagtgcaggacggcctgtgcatccatcccttcggcaaatccgacgacggcagctaccagaacgagggcaataaagccgttaactttaaagccgatcatcaggataagaagcagcgcgacgcctgccgcaataatgattaatggcatagtctttatctcttattagtgccagaaaagcagcgctttcgcgctgcacgtaggggggctgttaaacagccactaacatgccgccatcaacaaacaacaggtggccgtttacgaaatcagaggctttactagaaaggaacaccgcagcaccaatcagttcctgcggatctccccagcgtgcggcgggggtccgtttgcacaaccaggcggtgaaggcttcgtcctcaaccagtgctttagtcatttctgttttgaaatagcccggcgcaataccgttgacctgaatattgtggcgcgccagctcgacgcacatgccgcgggtgagcatttttaccgcccctttgcttgcggcataaggggtgatggtgtcacgtcccagttcgctttgcatgctgcaaatattaataactttacctgccttgcgttcaaccatgtgacgagttaccgcttggcttaccaggaacacggcggtctggtttactgcgatcacatcattccactcttgttcagggaactcagtaaaaggatgacggcgctggataccggcgttattcaccagcacatcaatggggccgatgtccttttcgatatgttcaacggcggcatcaatttcatgtttatgagtaacattaaaaggtgcggcaacggcctgaataccctcctggtggagtttttctacagcaagttctgcgcgttcggcagtaatatcattaataattatttgtgcgccatatttacccaggccggttgccagtaaaaagccaatgccctgtgcactaccggtaatcaagatattttttcctgccagactaaatagatcgttcattgtattattcctttatttatctcttagaaaacaagctggacttttgctgcctgggttttatcaccggcgaaacgtagcgcctcttccaggtcagtgaagggatattcagcactcagtaaaggcagtggattgataacgccattcgccagccaactcactgcggtattaaattcgctggtaaaacggaaagagcctctgagactaatctccttaccaatcaacgtcatcattgggaattctgccatcgcgcctcccatacctacctgcaccattacgccgcgtgcacgagtgacctccagacaggtattcacactactaggatgaccggacacttcaaagctgacatcgaaatagcctttttccgctttccagtgatccatgtcgtcgttttgtgggtttacgagcacatccgcccccatctctttgcccaggctaagggaacggggactcacatcagcacagacaatttccgcggcccccagtgttttcactgcactgacaatcaggcagccaatgggtccaacaccggaaataaatactcgcttgccctgtaactcgccggcctgatgtgcggcatgaatcgcgacggctaaaggttcggcaaaagccataaccttttcgtcagctttggccggataagggacacattggctcgtttcgaccattttataacgggtaaaaccaccatcaacatgagggaaatacatggcactgccaaaaaaacgcatatctgtacactgattctcgttatgttcaatgcagtatttgcagtgaccgcacggtttagacggattaatggctaccgtttgcccttcatgtaattcactactgtcgctatgaataactttaccgataacttcatgacctaacaccatcggtgcctttatcatgaaattacctacttttccttcctgataataatgtaaatcggaaccgcaaattccacctcgggttatttgtactaatgttccattattattccaatctatcgtctgctcggtaacggcaacagttttcttgcccgcaacaacgcaggactgtgttttcacttgcataaattcctcactggtcaggtagacacctcggaagcatttaagcggttttaactgtcattatttgtgatgaagatcacgtcagaaaattgttacattactatgttacgcataacgtgatgtgccttgtaattcttatcagtagaaataaaaaaacgtgaaattattatgccgccaggcgtagtatcgcagcaggtaagatgattcaggagattttaaatggcgggtgaaagctttattttgatgggcgttagtgggagtggtaaaacattaattggtagcaaggttgccgcgttattatctgctaaatttattgatggtgacgatcttcatccagccaaaaatatagataaaatgagccagggtattccattatctgatgaagatcgacttccctggctggaacgcttaaatgatgctagttacagtctttataaaaagaatgaaacaggatttattgtctgtagtagtttaaaaaaacagtatcgtgatattttacgcaagggtagcccccatgttcatttcctctggttagatggcgactatgaaactattctcgcgcgaatgcagcgtcgggctgggcattttatgccggtagcgttactaaaaagtcagtttgaggcactggagcgtccacaagcagatgaacaggatattgtgcgcattgatatcaaccatgatattgccaatgtcaccgaacaatgtcggcaggctgtgctggcgatacgacaaaacagaatatgtgcgaaagagggcagcgccagtgatcagcgctgcgaatgattttcaaaaatcggctttcaacaccacgcggtaacgcgccttaccgtcgcgcacatgctggatggcgtcgttaattttgctcatcgggaacagttcggtggtcggcgcaaccttgctgcgggcggcaaaacgcatcagcttacgcagctcataaggcgtgccggtagcagaaccagagacgctgcgatcgcccgcaattaacgtaaaggccggaacagacagcggcgtgagaaccgcaccgaccgtatggaaattaccgccataggtcagcgcctcaaaatagggctgccagtcgaggctgacgttgacggtgttgataatgagatcaaactgccccgccagtgctttcagtgcctgcggatcgcggctattcaccactttatcggcacccatcgccagcacttcctgctctttcgccggattagaactaaaggctgtcacctcgcatcccattgcgtgcagaagttttatagcgatatgccccagcccgccaataccaattaccccaacgcggctggtagcagtgatatggtgcatcaacagtggtttaaagaccgtgataccgccgcacaacagcggcccggcggactcgatatcaatattttctggcagtggaatcacccattgccagtccgcacgcaacttctcggcaaagccaccgcgattcataatcgtcggcaccgcaccttgctcgcagttgatctgattaccgctaatacaggcgtcgcagtgaccacagctacgcgccgtccagccaatcccgacacgctgaccgacctgcaaacctttatcctgcgcggcgctcccgagtgccaccacgcgcccaatcacctcatgcccggcaaccagcggatattgactaaatccccattcgttatcgatcatgctcagatcggaatggcagatcccgcagtaatccacctgcacttcaacatcttgtggcctcagctcaccgggatcgtactcataaacttccagttcgccgcccgcttcttttgcggcatagctttttatcatgctcattttttggtccttctctggtgttgtttgggaagtgtagagcatggcagggcggggtgcctggagtgtgacaaaggttacacatcgctgtatgcaatgctgaaaatttcagcacttagcgaggtgcgagcaagctggcgcttgcatggtggcgtgcgacaggtataatccacaacgttttccgcatacctcttcagtgccgaagtggcgaaatcggtagacgcagttgattcaaaatcaaccgtagaaatacgtgccggttcgagtccggccttcggcaccaaaagtatgtaaatagacctcaactgaggtctttttttatgcctgaaatccagtgtttatctatctttcccgctatattaactctctcaaggtcaaccgatatcaacgtacatctaccaacatatgttggtacagatgatggtatttccggttcgataatgcttgtaccaacagggagggaatacgagaaatcacaggacattgctaatgctggtacgcaatattacctgaagctaaaaacctgcacgttagccctttgtaggccagataagacgcgtcagcgtcgcatctggcataaacaaagcgcactttgctggtctgttcccctcaccctaaccctctccccggaggggcgaggggactgtccgggcacatttttagactttgtcatcagtctgagcctgccattggcaggctctggtgtccttttacgctaccatgctaataatcagcacaataatcagcccaaccacggagttgaccagctccagcagaccccaggttttcaacgtgtcttttacactcaggtcaaagtaacctttgaacaaccagaaagatgcatcgttaatgtgggtgagggtgttggaacccgcagccgtcgccagtaccagcagcgccggattcacgccaaccagctgaccagttgctggatctaggattgcagcactgataatcccggcggcggtcatcgcgctaacgacaccctgacccgtcgccagacgaattagcacagtgatcagccatgccatgatgtaggggctgatattgccgtgggacatcaacatgccgatggtgtcgccaatgccggtgtcgatgatggtctgcttcagcacgccacccgcaccgatgatcagaatcaccattgcaatactcttcaccgcgctttcaaaagcgttcatcacccactgcatgtcatgaccacgtgcggtgccaaagagtacgaatgcaaccaccatcgcaataaacattgcaatcgggctggaaccgataaagttaaccacttcccaggcaggggtatcttttaccagccagatattggcgatggtggtagagatcataatgatcgccgggatcagcggcaccagaatgctaacgccgaaagagggcagattattcatatctaccggttgatctgctttcaggaaacttggcgttgggcgctcaagattgccgaggaacttcggcaggatcagacctgcgcagattacacttgggatcgtcaccagtacgccatagatataaaccatccccatatccgcgccataagcattcaccagcgccaccggacccggctgcggtgggaacagactatgtgcggtagtggcagctgctactgccgggatcgccagtttcaggaacggaattttagcttcggcggcaataacaataaccagcggcgctaacatgataaaggccacttcatagaacatcgccagaccaaaaatcaggccgatgataatcacgctcagctgtacatagcgcagaccgagacgcgccagcagcgtatgcgctatctggtgagccgcgccggagtcgaccatcaatttaccgatgaccgcaccgaacaccacgatgatagccagttcccccagcgtgttgccgaagcccgctttcatagtgtgcagcaggctcatcaaatccatgcccgccagcatcccgacggacagcgccgccaccaacaaagccaccatactattgattttgaacttcaaattcagtaccagcatcagaccaatgccgaataccacccagagaatgttaagcacatgcataacgttttaccttacctggttgaaccgttgttattttgggcgatatgttatgtaaattggtcaaccattgttgcgatgaatgtcacatcctctgatcaataaccatcgattaccctttgctgcaatttgcagcaacaaccatgagagtgaaattcttgtgatgtggttaaccaatttcagaattcgggttgacatgtcttaccaaaaggtagaacttatacgccatctcatccgatgcaacgccacggctgcggtctggttgttcatccggatacctaaacaactccagggttccgcgtctctttgctgtggaacccactatgtgaaagaggaaaaatcatggaacagacctggcgctggtacggcccaaacgatccggtttctttagctgatgtccgtcaggcgggcgcaactggcgtggttaccgcgctgcaccatatcccgaacggcgaagtatggtccgttgaagagatcctcaaacgcaaggcgatcattgaagacgcaggcctggtgtggtctgtcgtagaaagcgtgccaattcacgaagatatcaaaacccacactggcaactatgagcagtggatcgctaactatcagcagactctgcgcaacctggcgcagtgtggcattcgcaccgtgtgctacaacttcatgccggtgctcgactggacccgtactgacctcgaatacgtgctgccagacggctccaaagctctgcgcttcgaccagatcgaattcgctgcattcgaaatgcatatcctgaaacgcccaggcgcggaagcggattacaccgaagaagaaattgctcaggcagctgaacgcttcgccactatgagcgatgaagacaaagcgcgtctgacccgtaacatcattgctggtcttccgggcgcggaagaaggctacaccctcgaccagttccgtaaacacctggagctgtacaaagatatcgacaaagcgaagctgcgcgaaaactttgccgtcttcctgaaagcgattattccagttgctgaagaagtcggcgtgcgtatggctgttcacccggacgatccgccgcgcccgatcctcggcctgccgcgcattgtttccaccattgaagatatgcagtggatggttgataccgtaaacagcatggcaaacggttttaccatgtgcaccggttcctacggcgtgcgtgctgacaacgatctggttgatatgatcaagcagttcggtccgcgtatttacttcacccatctgcgctccaccatgcgtgaagataacccgaaaaccttccacgaagcggcgcacctgaacggtgacgttgatatgtacgaagtggtgaaagcgattgttgaagaagaacaccgtcgtaaagcggaaggcaaagaagacctgatcccgatgcgtccggaccacggtcatcagatgctggacgacctgaagaagaaaaccaacccaggttactccgcaattggtcgtctgaaaggcctggccgaagttcgcggtgtcgaactggcgatccagcgcgctttctttagccgttaatatccaccggcatggctgcgcgccgtgccggttccttcttccttgccgtcactctttgaagacggattctggagtttacgatgactactattgttgacagcaatctgccggttgcccgcccgagttgggatcattctcgtctggaaagtcgcattgtgcatctcggttgcggggcgtttcaccgcgcgcaccaggcgctgtatacccatcatctgctggaaagcaccgacagcgactggggcatctgcgaagttaacctgatgccaggcaacgaccgcgtgctgatcgaaaacctgaaaaaacagcaactgctgtacaccgtagcggaaaaaggcgcagagagcaccgagctgaaaattatcggtagcatgaaagaagcgctgcatccggaaatcgatggctgcgaaggtattctcaacgcgatggcgcgtccgcaaacggcgattgtctctctaacggtcacggaaaaaggctactgcgctgatgcggcaagcggtcaactggatctcaataacccgctgatcaagcacgatctggaaaacccgactgcgccgaagtccgcgattggttacatcgtcgaagcgttgcgtctgcgtcgtgaaaaagggttgaaagcgtttacggtgatgtcctgcgataacgtgcgtgaaaacggtcatgtggcgaaggtcgcggtactggggctggctcaggcgcgtgacccgcagctggcggcatggattgaagaaaatgtcaccttcccgtgcaccatggttgaccgcatcgttccggcggcgacgccagaaaccttacaggaaattgctgaccagctgggtgtttacgacccgtgcgccattgcctgcgaaccgttccgtcagtgggtgattgaagataacttcgttaatggtcgcccggattgggataaagtgggcgcacagttcgttgcagacgttgtgccgttcgaaatgatgaagctgcgtatgctgaacggcagccactcttttctggcgtacctcggttacctcggcggctatgaaaccattgccgacaccgtgactaacccggcttatcgcaaagcggcctttgccctgatgatgcaggaacaagcgccaacgctgagcatgccggaaggtacagacctgaacgcctatgcgacgctgctgatcgagcgtttcagcaacccgtctctgcgtcaccgtacctggcagattgcgatggacggcagccagaagttaccgcagcgtctgctggacccggtgcgtctgcacctgcaaaacggcggcagctggcgtcacctggcgctgggcgtggctggctggatgcgttacacccagggcgtggatgagcagggtaatgccattgacgtggtcgacccgatgctggcggagttccagaagatcaacgcgcagtatcagggcgcagaccgcgtgaaagcgctgctgggcctgagcggtatttttgccgatgatctgccgcagaatgccgactttgttggcgcagtgacggcggcatatcagcagctgtgcgaacgcggtgcgcgcgagtgtgtggctgcgctgtaactaactgattaccctacagacttactggtcaatcaaactgatatttggttgaccagttttcgtttttttgcccacctgtacgtgccaacttccagtgctaatggtatagtttgagattaacgggggccgtaaaattgcccgttgtaggccggataaggcgttcacgccgcatccggcaaaaatttgattaaccgcacctaacggacacaacaccatgaaatctgccacctctgcgcaaagaccttaccaggaagtcggggcgatgatccgcgatctgatcataaagacgccgtacaatcctggcgaacggctgccgccggagcgtgaaattgcagaaatgcttgatgtcacgcggacggtggtacgtgaagcgctgatcatgctggagatcaaagggctggtggaagtacgccggggtgccggtatctatgttcttgataacagtggcagccagaacacagacagtccggatgccaacgtctgcaacgatgccggtccttttgagctgttacaggcgcggcagttattggagagcaacatcgccgagtttgccgctttgcaggctacccgcgaagatatcgtcaaaatgcgtcaggcattgcaactggaagagcgtgaactggcttccagtgcgccgggcagcagcgaaagcggtgacatgcagttccatctcgctattgccgaagcaacgcataacagcatgctggtggagctgttccgtcagtcctggcagtggcgggaaaacaatccaatgtggatccagttgcacagccatctggatgacagcctgtatcgcaaagagtggttgggcgatcacaaacagatcctcgccgcgttaatcaaaaaagatgcccgagcggcgaagctggcaatgtggcagcatctggaaaacgttaagcaacgtctgctggaattcagcaacgttgacgatatttattttgatggctatctgtttgatagttggccgctggataaagtcgacgcctgacttattataataagcgcaagggtaaacgttccttgcgctttcttaaattaagaagtcgcaatgagtattactttgtaaattgcagggtattgtttagctatctgtataacctgaatgttagtactcattcttcctggtagtaaggcgagattattaaagttgccatgcagcgtccggggaagtgttgggcgctgttttttttgtttcttaataatgtgttgtaagccgtagaaggcgtgtaggtcgcaccctatgcgacctacacatcagtcaggaattacccttcacgttctaccactttaatttccaccatgccgatcccgagcttacgcgggctgtgtccgaggatattcccttcgttggtactgacaggttccggcggcacaattaccagtgtgtcggcatcggttgggttatcgaaatgcagtgtggtggtggtcacttcattgcccagcacaagagtttgttcttcattgcctacgcgtaccggaataggacggctggcgttattgccgtatgctttggcggtaatcaccaggtcaaatttcttcggcagcggatgcttgtactcgatttttacttcatcgcccagctgcgcgttggaccagcggccccagctctccggacgggaaatcccgctaaactgtttcacctcttctggcgcaccggcgacgttaaagatgaaactgtcggctttgtagcgaatatcgttatcaacaatcttcagcgtatcgacattgcctttgtaacgcgccatgtcgatgaccgtatctttaaatgccgttttgccctgccatgttgttttgtcaacatgctgaacaatttgctgaccgccaagctgcccttggctgacacaccagtcggtggaaagtgccagttccggagcccagagttgtgccatcttgtagcaacggtcaacccagacgaaattgtcgcgtggagcgaaatcggccagctggaaacgcagcggtgcactgtattcgctttccggcagcggttccacgcgtttgtcactaacccgcaacagcagcggcaaacggaaatggctaccgctgaaggcaatcatgtttttctgctggtcgatggtgaactctttcatctctttagggaatttccacaggcggatgatatctggcttccacgccaatgttttctctttgatattgaggaagatttcgctcatgctctgcccggataaactgctacgaccaagtccgagatagttatcgccaccgagaatgtccagcaccgtcgcgccgttatccatcgtgttacgcttcactgccagcgtctcttgctgcggcttgtcgccacgaatgacaaaaaacaggttattgcgatcctgcttattgaggtatttccacgccgtgttgttcatcgctaaatggtcagaagagacgacgatgacggtatctttaaaccacggactcgctttgattttgttgataaacgtcgcgatgttctcctggctgcaacttaccgcgctgaaactctgattcggtttaccgtcaaaatcatattttttgcggttacaggtacgagagataaaaccatccgggtgatgggtatcgactgtcagggtaaacagactgaatcgctgaccactgcgggaaagctcttcaaactttttccacgcttcatcgagaacggtatcgtcgtagaatccccagtcgttgcgatagtgcgggtcggctaccacgcttttcagctcttcactgccgtataagtggtcgaagccatggctcttcaggaacacatctttaccggcaaaacgcagattcgcgccctgcacgaaatagttctgataaccgctgtttttcaggatatctcccagacagatgttctgcgggaagaagctggagacagaggcggaggcgttgccttcaaagggggcaaacagcggtatgccgcactgagaagccaccatgcccgcaatcgtgtaatctgttcccggcagctgctgcgtgtggctgaaatccaggccttcatttttcaacgcgcccagttcaggcgtgagatccgggaaagcctcgttatcaaaataggtccgctcgagactttcgccgtagatataaaccaggttgagtttcgggtcagggatagttttgctcggctctttataataagccgcaaagtccgggtcgccgtcgcgactctgggatttcaccagttccgttatctgacgaaatgccgggctggcgtccacgctacccagcgccagtaagagcgccagcaggctgtaaccaaaatggtgcggatgatggcgacgacggcgcaggatccagcccagcgcaccgaacaccgctgtcagccccagcacaatgccgatacccggcaaaatgtatttgctgacgccagcaccggtcaggctgttggttaaggtatagagaaccgcgtcgttaataccatcgccagtaaaatagtcgctggcaaacagggtgatatttaaaacgacaaatagccccagcaccgttaacgtggctgcaaaccaccaggtgttacgtcccgctttccatgcgtaaatcagcacagaggcgagaaaaagggcgaaagagagtagttcactcaacgggcgatcctcactaaaccgggccgtttagccaacgtttaagctttttgagaagcacaatgtaatggcgtcgccatattgctgcaattctagtgtcaaaaaaatgcgatgttgttaggaattagtttataaacagacttttttgattacggtcacttcccgtgtaacaggggtaaaaccgtccaggagcagggaaaagggcaggagagagccgcgtcagccgggtaacagctaaaacgcggcgtttcgcggttcaggaaatgaagttcagcccctgttttaacaccagatcgcaggctttggttttcaccttttctgccagcggagttgttccgatgttatccagattgagttgctgaccatctttggttttcagcaaaccctgaatgccgtccagatagttggtgtcttctttttgctcttcactgttcaggcccagcttttccagcacctggttcttgatgttttcggcatcggttacgctcgccagcttttgcttcgcgcagtattgcagaatgcctgcggcattgttcatgttatctgcgcttaaggcctggtttccgctgctaagcaagttagttaaactcgcgaggctccaaccgccttcctgtgtcgtgctgttttggttgccaagttcgctggcggcgctggagagcgcatctttccaggacgcagcatgcaccccggtggaaattaatgcgctggcggcaatggcacagcacagaagatgtttaacagttttcatcatcattactcaaggtggaattgtgtcgcagtataccgccagaaacggggattaatactctttacctgttacccggctacggtagctatcccagttgaagatcacccacaaactgttacccaggcgcatacggtccatcacgcgttcgcccagcaacttggtcatctcttccatattactgttggtcagcatcccggttgggcgtttggaagaagagcggcgatcgacgatctggttgatgatcactttttcgtatttgctttcggtctgcacgccgatctcatcgatcaccagcagatcaacgttgctcagatcgttaagcagttgttcttcgctggtaccgctattcctgaaggtatctttcatcgcgctcataatatcggccacggtgatgatcaatacggatttaccgcgtagcagcagctcgttgcagattgccgccgccagatggtttttgccggttcctggcttaccagaaaagatgaagctggcgatgttgccgtcaaactcttcgacatactggcgcgctttgcttaacgcattcatctgcccttcacactcaacgcgatagttctcaaaggaacagttctgatgcagtggacgaataccggagcggttaaaggtgcgctgcattttcatcgcccgattttcacgttcgagagcggcggagcggatcgctccttgttctttttgccaggccagtagttcttcacccgttttgaatgcgggtttgatatgggcaggcatcattttttgcaggcgttgcatcaggtcgccaacgtttttcatcgttaccctctgaatcctggtggaatttggctgtcaggttcgctgaccgtattcacatctcgtttcggcagtccgccgttgctggcacgaccgatttgcaggctgcgcgccagtttttgttgccactgcacatggtgaaagactttaccttccgcctgccagtaggcaatgaaactggccagttcttcggtggtcaccggctctcttagcgccacgccccatagcgccgccaggcggataaaatcggcatcgggttgccagtccggatacatggcgaatttccccatgggtacagcaacgggagcggcttgcggttcctgatagagttgatcgtccagagcgacatcgcttcccggacgcgccagcttttcttccagcgccagcagttcagccaggcgtgcaggcgtgacggcataaaacgccggggcattgttagcaaatacggcaaccacaccgccttcagcttttgccagaacggtttggtgatcgtgtaccagggcgtcaataccaacgacgtccggggtcaaaactctggaagacatactgtttctcaaatatggaacgatgaacgagaagggagataacttttatagtaacacacggaggagaggaggctgtctctcatccgtgtgcttaagcgaggcaattttatacgcgagggcgcttgcggtacaaccataatccaggaatggaaagaccgatggataacgcaccaacaatgctactagctgtaagaaagttggttaacagggtaatcatcaacggttcgctgtaacctaactggctgatttttaccgcgctaatcattgcggtataagcgcttatgcccgggaacatagggataacggccgccacggtaaacactttcggatgcgccagataccagcggctccattgaataccaatggtaccgaccagcatagaagccataaaggtactccactcaatattcaacccgctggtcatcaagatcattcgggaaccatgacctatcgagccaagcagcgcacaccagcgtaacgcccgcacgggaacgttgaacaccatcgcaaagccgaccgcaggaatggcggcgaggatcatatcctgcgccaacgctaacagaaattcgatcacacccatccgcgtagcccccaaatcgtcagtgccatcactacgccgacgcaggtagccagtgtcagcagactggcgatcgcccagcgtgccagtccggtattgatgtggcctttaaacatatcggcgacggcattaatcaacggaaagcccggcactagcagcagaacgctggcggccatcgcaatggtgggggtattgctgaaagtggggagttgcaaaagcaatccggaaatggtggtggcggcgaaagcggtaaggcaaaagttgatctgtggatgaagatgacgttgtgccagcagctggcggatatacatcgcggtcgtactggcaaagaaggtgatgacggcaccatcccagccaccgttattgagtttacagaaacaggcgcaagaaaggccaaccattaaggctaccagccatcttgggtaacgtaatggctgaatttggctaaatcgtttctctacgcctttgtaatccagcagatgatgctccgcaagaatcacaatgtgctggacttcagtcaccacatgcatattaatgccgcgatcgtgatttttacgtgtgcttgtcaggcattgcccatctttaatagttgtcagcactatggcgttgctagagatagaactttcgacgctgtccattcccagtgcccgacccagtcgactggaaagctcatcaaccaacgcgctttccgcaccatgttgcaaaagaaataatccacactggatacaaagccgtgttacggctcgctgttgctcagtttgcataactcgccctttgtcatagacgtgctgcgtattgttcagataatgagaatccatttgtatcatgaagcacggttgttttgcggtaggttaagatcaaaattgcgctgattaatcctggttatcgggagaagctcggtgataaaaagcgaattatctctcgccgcaaacaaactatcacatgaatattatcatcataatgaatttattgtttggcctttacgaatcaggataatagataaccgggcacgttttttaatgttaacaagctaaaaccatcagatttcattgaataaatattggttgtgtgattttgcattctgcgggaagggatatcatttaattataaattaaatgaatgtgatttctgtttttcattaagtattcctaacaacttaatgtagatattttaaatgtctccaggctatttcaccaggttatcatttgatgctaaccttctgacacatgcagtggagttgttgtgcagcaggagtatgctgatatgaaagtgaatgctaaggataatttattcgcttaatctattaatttgctggaaacatttaaggaatgaatatcctgaataaaccatcataatttttagacagtggatgtggaggaaatatgttgccaggatgctgcaaaaatggaattgttatcagtaaaatacctgttatgcaagcagggttaaaagaggtcatgaggactcacttccctgaatatgaaataatatccagcgcctctgcggaggaccttaccttattacaattacgtcgttccggattagtcattgctgatttagccggtgaaagtgaagatccacgttctgtttgtgaacattattattctttaatcagtcaatatcgggaaattcactgggttttcatggtgagtcgctcctggtattcccaggcagtagaactgctcatgtgccctacggcgacgttattgtctgatgttgaacccattgagaatctggtcaagaccgtacgttccggcaatacgcacgcagagcgtatcagcgccatgctgacctccccggcaatgactgaaactcatgattttagctatcgctccgtcattctcactcttagtgagcgcaaggtactgcggctattaggtaaaggatggggcatcaaccagatagctagtttgcttaagaaaagtaataaaactatcagcgcccaaaaaaacagtgcgatgcgtcgactggcaattcacagcaacgctgaaatgtatgcatggataaatagcgcgcagggtgcaagagaacttaacttgccttctgtttatggagatgccgcagaatggaacacagccgaattaagaagagaaatgagccacagttaaaaaaatgcgtcatgagtagtatcggtattgagagtttattcagaaagtttgcgggtaacccttataagctccatacctataccagtcaggagagttttcaggatgccatgagccggatcagctttgcggcggtcattttttctttttctgccatgagaagtgagcgcagagagggattatcttgcctgactgaactggcgattaagtttccgcgtacccggcgtttagttattgcggatgatgatattgaagctcggctgattggtagtttgagcccaagtccgctggacggtgtattaagtaaagcgagtacgctggagatttttcatcaggaactctttttgagtttaaatggtgtacgtcaggcgaccgaccgactgaacaatcagtggtacattaaccaaagccggacgttaagcccgacggagagagaaatattgcgctttatgagccgtggctacagtatgacacaaattgccgagcagcttaaacgcaatatcaaaacgatccgtgcacataaatttaatgtgatgagcaaactgggcgtcagttctgacgcagggttgttggaggccgcagatattctgttatgtatgcggcattgcgaaacaagtaatgtgttgcatccctattaatccgcatgatgccgggtttacttccccggcagtgctttcatttcagcgtacaatcgccacattgctgcacatccggtaagcgataacgctggcagcaagtgcggcgcaccagcaggccgtcgcgcagtaccacggtacgccagagtggattatcttcaccgttcgtgagcgttttctcaaaaaagagggcatggcgcaggctttcaacagtagcctcgccgagcagttgcttcatctcagtgagataccagttgatcaaataaccggtattactccagataagtttgccgttgatctctccggtcgcttctagtgcttgcacaaccggaaccagcgcctggctgattaacgtttccattcgatgctgcgggctatgtggtgttgcgtttttatcttcacacacatcgacccagaaacaggcgacgcgtccggtttcgtgaaactcagcatggaaatgttccgggctcacatctaatgccttttcctgcgtcagtagcgccagcattaatggtggcaccatcaggccgatataccattgtgcccatagactgatcagcggtttgttctcgcggatcatcatcggttggttgcgatagatatgatcggaatagaccgccagcagagaacttagcacattcggactactccattgcgccagcgtcatggcgttaagtggggcaggttcatccaggcggataaactccagcaaatgttcacgatgttttgcgatcgtcgcccgcacggcttgcgcaagcgtgggatcctgcggctggagatgcgttcgccagatgacatcttcatagagcggtgcggaacgataggccataatcgggatagtaatctaaatgataatgattgctaatcatagcgataggtttacccgatagcaagggatttatctggcttgcaaatgataaaaattatcatatgatattggttatcattatcaatgaaagagatgaaatcatgttgcaacgtacgctgggcagtggctggggagtgttgctgccgggattgctgattgcggggctgatgtatgcggatttaagcagtgatcagtggcggattgtcattctgatgggattagtattgacgccgatgatgctgtatcacaaacagttgcggcattacattttgctaccaagctgcctggcacttattgctggcatcatgctgatgataatgaatttgaatcagggatgaaaaatcaaggaagaaacaagaaaggaagtaaagataattggtgcgaggggggggacttgaacccccacgtccgtaaggacactaacacctgaagctagcgcgtctaccaattccgccaccttcgcacagtcatcttactttttttgatatcgcctcgtttggtgcgaggggggggacttgaacccccacgtccgtaagaacactaacacctgaagctagcgcgtctaccaattccgccaccttcgcccagtgcgagcaatatcaacgtggtttttggtgcgaggggggggacttgaacccccacgtccgtaaggacactaacacctgaagctagcgcgtctaccaattccgccaccttcgcataccatcaattcttaaaaagaattgctaccacggaggcgcattctagtggttttcagcttttcgtcaatagttaattatcgacagaggtgtaattgctggaaaaatgtccatcaggaaactagcgtgcaggtttggtatgcatgcgggggcagatgccagatgcgacgctggcgcgtcttatctggcctacgaagggctaacgtgcaggttttgtaggtcggataaggcgttcacgccgcatccgacacggtattcggcgagataattaacctttcttcgcctggcgggtcataatggcgcgatacaccttgaagcgccctgtttgcgcgatcacttcgtggaagccaaatgtctcatccagcacgtccggataaggcaggaaggcgttcgctacaattcgcagctcgccgccgctattaagatgacgcaccgcaccgcgaatcagcgtttgcgccgcatccaggctggtttgcatcccatcgtggaacggcgggttggagatgatcatatcaaaacgacctttcacctcggaaaagacgttgctggcaaagacttcaccttcaacaccgttggccgcaagtgttgcgcggctggcttctaccgccggggcagagacatcgcacaaggtgagacgaattttcgggctatggcgcgcaaaggcaacactaagcacgcccgcgccacagccgacatccagcactttacctttcgtgtgcggagttaacgtgctgagcagcaactggctaccgacatccagaccgtcgcggctaaacacgccaggcagcgttttgaccgtcaggccatcgacgctgtattcgccccagaatttctccgcatcaaataccggctgtttttccagacgaccaaaatagaggccacagcgacgagcgctgtcgactttattcaacggcgcataatctgccagcatctgctcggcgctgcgcacgccgctgcggttctcgccaacgacaaaaatatctgtccccactggcagcagagaaagtaaattcatcaactggaactgggcttccggtttgttcttcggccagtagtaaatcagcgtatcgcaatctgcgacgtcatccgccgtggcgaccagactgaaacgggcgttatcccccatctggcggcttaatacctgccagtggtggaattgctgggtatgagcacggctggccgcggtatctaaacgcgcgggcaggtcatcctgtaagtctccggcaaacagaatacggctttgttcgaaatcatcactgtgacgcagcaagacttcacttgccggggtaaatgcagacatggaatgctcctcaattgatactggcggcgattatagccatatgttggcgcggtatcgacgaatttgctatatttgcgcccctgacaacaggagcgattcgctatgacatcccgacgagactggcagttacagcaactgggcattacccagtggagcctgcgtcgccctggcgcgttgcagggggagattgccattgcgatcccggcacacgtccgtctggtgatggtggcaaacgatcttcccgccctgactgatcctttagtgagcgatgttctgcgcgcattaaccgtcagccccgaccaggtgctgcaactgacgccagaaaaaatcgcgatgctgccgcaaggcagtcactgcaacagttggcggttgggtactgacgaaccgctaagtctggaaggcgctcaggtggcaagtccggcgctcaccgatttacgggcaaacccaacggcacgcgccgcgttatggcaacaaatttgcacatatgaacacgatttcttccctcgaaacgactgatttaccggcggcttaccacattgaacaacgcgcccacgcctttccgtggagtgaaaaaacgtttgccagcaaccagggcgagcgttatctcaactttcagttaacgcaaaacggcaaaatggcggcgtttgcgattacgcaagtggtgctggatgaagctacattgttcaatattgcggtcgatcctgactatcagcgtcagggattgggaagggcgctgctggaacatctgatcgacgaactggaaaaacgcggcgtggcgacactatggctggaagtccgtgctagtaacgctgccgccattgccctgtacgaaagtttaggctttaacgaggcgacgattcgccgcaattactaccccaccacggacggtcgcgaagacgccatcatcatggcgttgccaatcagtatgtaatacaaggtggaataatgaagtgggactggattttctttgatgccgatgaaacgctgtttacctttgacagtttcaccggcctgcagcggatgtttcttgattacagcgtcacctttaccgctgaagattttcaggactatcaggccgttaacaagccactgtgggtggattatcaaaacggcgcgatcactagtttacagcttcagcacgggcggtttgagagctgggccgaacggctgaacgtcgagccaggtaaactcaacgaagcctttattaatgcgatggcggaaatctgcacgccgctgccgggcgcggtttctctgcttaacgccattcgtggcaacgccaaaatcggcatcatcaccaacggctttagtgccttgcaacaggtgcgtctggaacgcacgggcctgcgtgattacttcgatttgctggtgatttccgaagaagttggcgttgccaaaccgaataagaaaattttcgattatgcgctggaacaggcgggcaatcctgaccgtagtcgcgtgctgatggttggcgacactgccgagtccgatattctcggtggcatcaacgccgggcttgcgacctgctggctgaatgcacaccatcgcgagcaaccagaaggcatcgcgcccacctggaccgtttctagcttgcacgaactggagcagctcctgtgtaaacactgattgcctcccccccgttgatgggtaaaatagccgcaatttttcgttttcaacaagcgcggcgcgatgccgcttactcaagaagaaagaattatgacgttgtctccttatttgcaagaggtggcgaagcgccgcacttttgccattatttctcacccggacgccggtaagactaccatcaccgagaaggtgctgctgttcggacaggccattcagaccgccggtacagtaaaaggccgtggttccaaccagcacgctaagagcgactggatggagatggaaaagcagcgtgggatctccattactacgtctgtgatgcagtttccgtatcacgattgcctggttaacctgctcgacaccccggggcacgaagacttcagcgaagatacctatcgtaccctgacggcggtggactgctgcctgatggttatcgacgccgcaaaaggtgttgaagatcgtacccgtaagctgatggaagttacccgtctgcgcgacacgccgatcctcacctttatgaacaaacttgaccgtgatatccgcgacccgatggagctgctcgatgaagttgagaacgagctgaaaatcggctgtgcgccgatcacctggccgattggctgcggcaagctgtttaaaggcgtttaccacctttataaagacgaaacctatctctatcagagcggtaaaggccacaccattcaggaagtccgcattgttaaagggctgaataacccggatctcgatgctgcggttggtgaagatctggcacagcagctgcgtgacgaactggaactggtgaaaggcgcgtctaacgagttcgacaaagagctgttccttgcgggcgaaatcactccggtattcttcggtactgcgctgggtaacttcggcgtcgatcatatgttggatggcctggtggagtgggcacctgcgccgatgccgcgtcagactgatacccgtaccgtagaagcgagcgaagataaatttaccggcttcgtatttaaaattcaggccaacatggacccgaaacaccgcgaccgcgtggcgtttatgcgtgtggtgtccggtaaatatgaaaaaggcatgaaactgcgccaggtgcgcactgcgaaagatgtggtgatctccgacgcgctgacctttatggcgggtgaccgtagccacgttgaagaagcgtatccgggcgatatcctcggcctgcacaaccacggcaccattcagatcggcgacacctttacccagggtgagatgatgaagttcaccggtattccgaacttcgcaccagaactgttccgtcgtatccgcctgaaagatccgctgaagcaaaaacagctgctcaaagggctggtacagctttccgaagagggcgcggtgcaggtgttccgtccaatctccaacaacgatctgatcgttggtgcagttggtgtgctgcagtttgatgtggtggtagcgcgcctgaagagcgaatacaacgttgaagcagtgtatgagagtgtcaacgttgccactgcccgctgggtagaatgtgcagacgcgaagaaattcgaagagttcaagcgtaagaacgaaagccaactggcgcttgatggcggcgataacctcgcttacatcgctaccagcatggtcaacctgcgcctggcacaggaacgttatccggacgttcagttccaccagacccgcgagcattaattcttgcctccagggcgcggtagccgctgcgccctgtcaatttcccttccttattagccgcttacggaatgttcttaaaacattcacttttgcttatgttttcgctgatatcccgagcggtttcaaaattgtgatctatatttaacaaagtgatgacatttctgacggcgttaaataccgttcaatgcgtagatatcagtatctaaagccgtcgattgtcattctaccgatattaataactgattcagaggctgtaatggtcgttattcatcactcatcgcttttgtgatggcgaccattgacttctgtagagggtgaagtctctccctattcagcaatgcaacctcgtgttgccaggctcaaattacgagcaaacatacaggaataaatcgatgactatgacaagactgaagattagcaaaactctgctggctgtaatgttgacctctgccgtcgcgaccggctctgcctacgcggaaaacaacgcgcagactaccaatgaaagcgcagggcaaaaagtcgatagctctatgaataaagtcggtaatttcatggatgacagcgccatcaccgcgaaagtgaaggcggccctggtggatcatgacaacatcaagagcaccgatatctctgtaaaaaccgatcaaaaagtcgtgaccctgagcggtttcgttgaaagccaggcccaggccgaagaggcagtgaaagtggcgaaaggcgttgaaggggtgacctctgtcagcgacaaactgcacgttcgcgacgctaaagaaggcagcgtgaagggctacgcgggtgacaccgccaccaccagtgaaatcaaagccaaactgctggcggacgatatcgtcccttcccgtcatgtgaaagttgaaaccaccgacggcgtggttcagctctccggtaccgtcgattctcaggcacaaagtgaccgtgctgaaagtatcgccaaagcggtagatggtgtgaaaagcgttaaaaatgatctgaaaactaagtaattcgtcgtaattcgtcctcccgaactttgtcgggaggcgcgatgtgcaccacactaaaaatatcgcattgagtgattttcacgctcatatcaagcggtgacattaactatggtaaaggagacgcttatgtttcgttggggcatcatatttctggttatcgcgttaatcgccgccgcacttgggtttggtggtctggccggtaccgctgcaggcgcagctaaaattgtctttgtcgtcgggattattctgttcctggtgagtttgttcatgggccgaaaacgaccctaaatttcagaccattaagaaaattttatccaaagccagtccagcggactggcttttgcggttttagcgaataataaattgcgttactttgtcattctttcacaacaaaaacaggaaggcagaggtggggcagcgaatacctgtaacgcttggtaatattgcgccgttgagcctaaggccgttccagcctggacgaatagctctggtgtgcgaaggcggcggacagcgtggaattttcacggctggcgtgctggatgagtttatgcgcgcgcagtttaatcctttcgatctttatctcggcacatctgccggggcgcagaacctcagcgcgtttatctgcaatcagcccggttacgcgcgcaaagtcatcatgcgctataccacaaaacgcgaatttttcgatccattgcgctttgtccgtggaggaaatcttatcgatctcgactggctggtggaggccactgcaagccagatgccgttgcaaatggataccgccgcgcggttgtttgacagcggcaaaagcttttatatgtgcgcctgtcgtcaggatgactacgcgccgaattactttttaccaaccaaacaaaactggctggatgtgattcgcgcctccagtgcgatacctggcttttatcgtagcggagtgagcctggaaggcattaactacctggatggcgggatcagtgatgcgattccggttaaagaggcggcaaggcagggcgctaaaacgttggtcgtcattcgcactgtgccgagtcaaatgtactacacgccgcagtggttcaaacgcatggaacgctggctgggtgacagtagcctgcagccgctggtcaatctggtgcagcatcatgaaaccagctatcgtgacattcagcaatttattgagaaaccaccgggcaagctgcggatattcgaaatttatccgccgaagccattacatagtatcgcgcttggcagtcggattccggcgctgcgtgaagactataaacttgggcgtttatgcggtcgttatttcctcgccacggttggcaagctattaactgaaaaagcgccgcttacccgccatctggtgccagtggtgacgccggaaagcattgtcattccgcctgcgccagtcgccaacgatacgctggttgccgaagtgagcgacgctccgcaggcgaacgacccgacatttaacaatgaggatctggcttgatttgccgttttatcgacacccactgccattttgatttcccgccgtttagtggcgatgaagaggccagcctgcaacgcgcggcacaagcgggcgtaggcaagatcattgttccggcaacagaggcggaaaattttgcccgtgtgttggcattagcggaaaattatcaaccgctgtatgccgcattgggcttgcatcctggtatgttggaaaaacatagcgatgtgtctcttgagcagctacagcaggcgctggaaaggcgtccggcgaaggtggtggcggtgggggagatcggtctggatctctttggcgacgatccgcaatttgagaggcagcagtggttactcgacgaacaactgaaactggcgaaacgctacgatctgccggtgatcctgcatagtcggcgcacgcacgacaaactggcgatgcatcttaaacgccacgatttaccgcgcactggcgtggttcacggtttttccggcagcctgcaacaggccgaacggtttgtacagctgggctacaaaattggcgtaggcggtactatcacctatccacgcgccagtaaaacccgcgatgtcatcgcaaaattaccgctggcaagcttattgctggaaaccgacgcgccggatatgccgctcaacggttttcaggggcagcctaaccgcccggagcaggctgcccgtgtgttcgccgtgctttgcgagttgcgccgggaaccggcggatgagattgcgcaagcgttgcttaataacacgtatacgttgtttaacgtgccgtaagccggataaggcgttcacgccgcatccggcagttggcgcacaatgcctgatgcgacgcttaacgcgtcttatcatgcctacaggtttgtgccgaaccgtaggccggataaggcgttcacgccgcatccggcagttggcgcacaatgcctgatgcgacgcttgtcgcgtcttatcatgcctacaagtctgtgccgaaccgtaggccggataaggcgttcacgccgcatccggcagtcggcgcataatgcctgatgcgacgcttgtcgcgtcttatcatgcctacaggtttgtgccgaaccgtaggccggataaggcgttcgcgccgcatccggcagttggcgcacaatgcctgatgcgacgcttgacgcgtcttatcaggcctacaagtctgtgccgaaccgtaggccgtatccggcatgtcacaaatagagcgccggaaatatcaaccggctcaccccgcgcacctttaacgcatcagccaacggctcaacgtcttccggcgtggcgctcgcccagctttgcgcctcgccatacacgccgtgggcatgaaacgcgttcaggcgtaccggaacatcgccgagtcccttgataaacgccgccagttcttcgatgtgttgcaaataatccacctggccagggatcaccagcaaacgcagttccgccagcttgccgcgctctgccagcaaatagatgctgcgcttaatctgctgattatcgcgtccggtgagttgttgatgacattcgctcccccacgctttgagatcgagcattgcgccgtcgcacaccgggagcaatttttcccagccggtttcgctcaacatgccgttactgtccaccagacaggtgagatggcgcagttgcggatcgtttttgatagcagtaaacagcgccaccacaaacggcagctgggtcgtggcttcaccgccactcaccgttatcccttcgataaacagcactgctttgcggacatggctaagcacttcgtccacgctcatggattgcgccatgggcgtggcatgttgcggacacctcttcaggcaggtatcacactgctcgcaaaccacagcgttccacaccactttgccgtcaacaatctgcaacgcctgatgcggacactgtggcacgcactccccacagtcattgcaacgtcccatcgtccacggattgtgacagtttttgcagcgcagattgcagccctgcaaaaacagagccagacgactgcctggcccgtcaacgcaggagaaggggataatcttactgactaaagcgcatctgctgttcatggcttatcacgcgcggctggcgttccagaatacgagtgttgcgtgcggcttcttcgcccagccaggtggtgttggtgcgactaccttcggcgcgatatttttctaaatcgctcaaacgcaccatataaccggtaacgcgaaccagatcgttaccgctgacattggcggtaaattcacgcattccggctttaaaggcaccgaggcaaagctgtaccagtgcctgcgggttacgtttgatggtttcgtcgagcgtcagaatgtcgctgatgccggaataataataagcatgatgcggggcgacagtttgcagatgggtgatcggatctggctcatcgccatacggcaaacgcgcgcccggcgtggtgccgatatcggaactgatcccgctctgtgcgtgtaacatggcgcgtttttgccagccatatttcacgggggtattggcgacaaactccgccagttgcgcgctgatgcgataacctacttcatttgcggcggcttctttaccgtagcgcgcggcaatcccttctttttcacacagcaagttaaccgcttccgccagcccatacatgccaaacattggcacaaaacgttcagggttaatcagcccttctttcaccaggaagctattctcaaagaagtgactttgttgatagaggaattcacaccgcgcatcgatgatggcgatctgctgctggcagtagtgcggtagagtgcgcgtaaagaagtcatccaggctttcgctgcgctcggcaatggctttcaggttaaggcgtaccagcgtgctgccaccacccgccagcggcagactgttgtaacagctcacaatcccgtagcccccttttgtgaaaattttatcatgcaccggaccgttggcgatgtgcggtttgctacattcacagatgttcttcgccacttccagcagcaggtcatcaggggtgatttcaggatcgtagataaaggtcaggttcggactaacctgcttcaactctgcatctgcacgtaagatcgcgcgggtaatggggctatcagacgggccgatattggcgtgcataaaggcgtctggcagggttctgtcgaggtaacgccagaaacgttttattcgaacatcgatctcgtcttgtgttagaattctaacatacggttgcaacaacgcatccagttgccccaggtagaccggcatgcttgtgacgctcggtacgtggtggtaaagaatggtcagcagagagagtgcgtcatcaagatctttcgcgccttccagctccagccattcggaaccgttcgccagaaaacgggcgtaatcgggtaagacatagcgcggtttgtacggcgcatgaccttcaaacatatcgcagattacaccttcatccagcgcgcggcgggcttcggcaggaagctgtgggtaaggcagattgttttctgcttccagtgccagaaaatggcgcttctgctccgggctaagcactgggctggtgacaatttgctggcaacgttgttgcagtgcattttcatgagaagtgggcatcttcttttccttttatgccgaaggtgatgcgccattgtaagaagtttcgtgatgttcactttgatcctgatgcgtttgccaccactgacgcattcatttgaaagtgaattatttgaaccagatcgcattacagtgatgcaaacttgtaagtagatttccttaattgtgatgtgtatcgaagtgtgttgcggagtagatgttagaatactaacaaactcgcaaggtgaattttattggcgacaagccaggagaatgaaatgactgatctgaaagcaagcagcctgcgtgcactgaaattgatggacctgaccaccctgaatgacgacgacaccgacgagaaagtgatcgccctgtgtcatcaggccaaaactccggtcggcaataccgccgctatctgtatctatcctcgctttatcccgattgctcgcaaaactctgaaagagcagggcaccccggaaatccgtatcgctacggtaaccaacttcccacacggtaacgacgacatcgacatcgcgctggcagaaacccgtgcggcaatcgcctacggtgctgatgaagttgacgttgtgttcccgtaccgcgcgctgatggcgggtaacgagcaggttggttttgacctggtgaaagcctgtaaagaggcttgcgcggcagcgaatgtactgctgaaagtgatcatcgaaaccggcgaactgaaagacgaagcgctgatccgtaaagcgtctgaaatctccatcaaagcgggtgcggacttcatcaaaacctctaccggtaaagtggctgtgaacgcgacgccggaaagcgcgcgcatcatgatggaagtgatccgtgatatgggcgtagaaaaaaccgttggtttcaaaccggcgggcggcgtgcgtactgcggaagatgcgcagaaatatctcgccattgcagatgaactgttcggtgctgactgggcagatgcgcgtcactaccgctttggcgcttccagcctgctggcaagcctgctgaaagcgctgggtcacggcgacggtaagagcgccagcagctactaagtaagatgctttacgcctgatgcgctgcgcttatcaggcctacgagacgtatctacccgtaggccggataaggcgtagacgcatccggcaaaagccgcctcatactcttttcctcgggaggttaccttgtttctcgcacaagaaattattcgtaaaaaacgtgatggtcatgcgctgagcgatgaagaaattcgtttctttatcaacggtattcgcgacaacactatctccgaagggcagattgccgccctcgcgatgaccattttcttccacgatatgacaatgcctgagcgtgtcagcctgaccatggcgatgcgagatagtggaaccgttctcgactggaaaagcctgcatctgaatggcccgattgttgataaacactccaccggtggcgtcggcgatgtgactagcctgatgttggggccgatggtcgcagcctgcggcggctatattccgatgatctctggtcgcggcctcggtcatactggcggtacgctcgacaaactggaatccatccctggcttcgacattttcccggatgacaaccgtttccgcgaaattattaaagacgtcggcgtggcgattatcggtcagaccagtagtctggctccggctgataaacgtttctacgcgacccgtgatattaccgcaaccgtggactccatcccgctgatcaccgcctctattctggcgaagaaacttgcggaaggtctggacgcgctggtgatggacgtgaaagtgggtagcggcgcgtttatgccgacctacgaactctctgaagcccttgccgaagcgattgttggcgtggctaacggcgctggcgtgcgcaccaccgcgctgctcaccgacatgaatcaggtactggcctccagtgcaggtaacgcggttgaagttcgtgaagcggtgcagttcctgacgggtgaatatcgtaacccgcgtctgtttgatgtcacgatggcgctgtgcgtggagatgctgatctccggcaaactggcgaaagatgacgccgaagcgcgcgcgaaattgcaggcggtgctggacaacggtaaagcggcagaagtctttggtcgtatggtagcggcacaaaaaggcccgaccgacttcgttgagaactacgcgaagtatctgccgacagcgatgctgacgaaagcagtctatgctgataccgaaggttttgtcagtgaaatggatacccgcgcgctggggatggcagtggttgcaatgggcggcggacgccgtcaggcatctgacaccatcgattacagcgtcggctttactgatatggcgcgtctgggcgaccaggtagacggtcagcgtccgctggcggttatccacgcgaaagacgaaaacaactggcaggaagcggcgaaagcggtgaaagcggcaattaaacttgccgataaagcaccggaaagcacaccaactgtctatcgccgtatcagcgaataacggtatactgatctgatcatttaaatttgaagcactgagtacggagaacatatgaaacgtgcatttattatggtgctggacagtttcggcatcggcgctacagaagatgcagaacgctttggtgacgtcggggctgacaccctgggtcatatcgcagaagcttgtgccaaaggcgaagctgataacggtcgtaaaggcccgctcaatctgccaaatctgacccgtctggggctggcgaaagcacacgaaggttctaccggtttcattccggcgggaatggacggcaacgctgaagttatcggcgcgtacgcatgggcgcacgaaatgagttccggtaaagataccccgtctggtcactgggaaattgccggtgtcccggttctgtttgagtggggatatttctccgatcacgaaaacagcttcccgcaagagctgctggataaactggtcgaacgcgctaatctgccgggttacctcggtaactgccactcttccggtacggtcattctggatcaactgggcgaagagcacatgaaaaccggcaagccgattttctatacctccgctgactccgtgttccagattgcctgccatgaagaaactttcggtctggataaactctacgaactgtgcgaaatcgcccgtgaagagctgaccaacggcggctacaatatcggtcgtgttatcgctcgtccgtttatcggcgacaaagccggtaacttccagcgtaccggtaaccgtcacgacctggctgttgagccgccagcaccgaccgtgctgcagaaactggttgatgaaaaacacggccaggtggtttctgtcggtaaaattgcggacatctacgccaactgcggtatcaccaaaaaagtgaaagcgactggcctggacgcgctgtttgacgccaccatcaaagagatgaaagaagcgggtgataacaccatcgtcttcaccaacttcgttgacttcgactcttcctggggccaccgtcgcgacgtcgccggttatgccgcgggtctggaactgttcgaccgccgtctgccggagctgatgtctctgctgcgcgatgacgacatcctgatcctcaccgctgaccacggttgcgatccgacctggaccggtactgaccacacgcgtgaacacattccggtactggtatatggcccgaaagtaaaaccgggcagtctgggtcatcgtgaaaccttcgcggatatcggccagactctggcaaaatattttggtacttctgatatggaatatggcaaagccatgttctgatggatttgggcggagcgttgactccgcctttgttatgtcacaaaaaggataaaacaatggctaccccacacattaatgcagaaatgggcgatttcgctgacgtagttttgatgccaggcgacccgctgcgtgcgaagtatattgctgaaactttccttgaagatgcccgtgaagtgaacaacgttcgcggtatgctgggcttcaccggtacttacaaaggccgcaaaatttccgtaatgggtcacggtatgggtatcccgtcctgctccatctacaccaaagaactgatcaccgatttcggcgtgaagaaaattatccgcgtgggttcctgtggcgcagttctgccgcacgtaaaactgcgcgacgtcgttatcggtatgggtgcctgcaccgattccaaagttaaccgcatccgttttaaagaccatgactttgccgctatcgctgacttcgacatggtgcgtaacgcagtagatgcagctaaagcactgggtattgatgctcgcgtgggtaacctgttctccgctgacctgttctactctccggacggcgaaatgttcgacgtgatggaaaaatacggcattctcggcgtggaaatggaagcggctggtatctacggcgtcgctgcagaatttggcgcgaaagccctgaccatctgcaccgtatctgaccacatccgcactcacgagcagaccactgccgctgagcgtcagactaccttcaacgacatgatcaaaatcgcactggaatccgttctgctgggcgataaagagtaattgtgtttcgctgcaaggcgattgccttgtgaagccggagcgggagactgctccggctttttagtatctattcatttttctctccagcttgaatattttcgctatacttttcagtgaaatgtgttaataaatctattcaagtatctattcacgaatctattcattaatgagcgagctgactgatcttttactgcaagggccgcgttctgccccggaattgcgccagcgtctggcaatcagtcaggcgacgttcagtcgccttgttgccagagaagatcgggtgattcgctttggtaaagcacgggcaacgcgatatgcactgctgcgtccttatcgcggaattgagcgtattcccgtctggcgggtggacgataccggaaaggcgcataaattcgccgacatccggttgtgctggccgcagggaagttgtctggtaacaggcgcagatggcgacgaacagtggtttgatggtttgccctggtatttgaccgatctccgaccgcagggctttttagggcgcgcgtggggcaggaagttagccgcgcaactgaatctgactgatgatatacgtctctggcaggaagaagatgtgctctacgccctgaccgtatttaacggtgaatatactggcggttggttggtcggggaggggaattatcagcgatggattactgcacaacaccctgcggaaattcctctggatcaaaaactcacccattacgaacagctggcaagtgatgcactggcaggagaaattgtgggttcttctgcgggcggcgagcagccaaaatttacctactatgcacaaacgccgagtggcaataaacatgtgttggtgaaattcaccgtaccacagcaaaccgcggtcagccaacgttggggtgacctgctaattgctgaatctattgccgcgcaaatcctgcgtgacggtgggatccacgccatcgagagtacggtgcttgtaacaagtaacaggcaggtattcctcgaagcggaacgctttgactgcaaaggtaacgatggtcgcttgcctattgtgagcctggaggcggtgcagagtgagtttatctcttctccgggaagctggccgcaggcaatgcgccgtttgtgtgagcaacaacttgtcactcaccagagcgtggcgcaaacagaagtgatctgggcatttgggcgacttatcgccaacagcgatatgcacgcaggtaatttaagcttttatttatctgaaccgccatttgcgctgacgcccgtctacgacatgctgccgatggtctatgcaccaaacagcgctggaatgctgcgtgatgctgccattgaggtgaagtttgatcttaacgtcagtaaaagcgcttggttaacggcgatcccgctggcgcagcagttctggcaaacggtcgccagagatccgcgtatcagcgaggcgtttcgccacattgcgcaagaaatgccggaaaaaatccggcaaatcgaagagaaagttgcccgcatgggcgggtaattaccttacagcccccgccatccatgcgcttaactcccgtagctctttttcctgttccgggaagtcaaccaacagcgcttcgcactcctgttgcagcatatctgcgcggtacaggcagccttgcagtcgtccggcgagggcttccagcggcgcggggttgaggctgtcggtaaacacctgggcgcgggtgatatggcctttttcaacgtcgaaatgcagttccacgccgccccaggtaaagcgttcatccagcagatggctgaatgccggagcctgaccgaagttccattcccagctactctggcgggcaaaggtttcggcgaagtttggcaagtctggcgttttgttcggggagatgatttccgcttccacgcgctcgccataatgggcgaaaaaggcctcggttatggcctcgcaaacctgctcatgggtgatccccggcaacagctcggtgaggttggtcacgcgggaacgtacgctcgtaatgcctttcgccgccagtttctttttatccggattgagatagtttgccaggcggctgaggtcggcattgagtagcaaggtgccgtggtggaagccgcgatctttggtttcgcgataggcgctgccactgactttgcggtcgccttcgacggttttcaccaccagatcgttacgtccggacgcttcggcgctgacgccgagcgcgttcagcgcattgagcacaatgctcgtggagatagttttatcgtactccggcttgccagccataaaggtaaagcaggtattgccgagatcgtggaacaccgcgccgccaccgctactgcgccgcgccaggcggacgttatcttcttccatccgccgggtattacactctttccacgggttctgcgcgcgaccaattactaccgtgtcggcattgcgccagagaaacagaacgcgctgcgtggcgggcatttggcgaaaaatacactcttccaccgccaggttaaaccacgggtcgtaagagtcagagatgagcaggcgtaatgtggacataacgatttcctttcttgtagtaatgggtcactcttttttctcgctttcttcctcttccggcaccggtttgctggcggctaacaggaaggggctttgctgccagcgggtgcgtttaccctgtagcagcgtgcgggtcagcactacaccgattgccagactgagcagcaacatcaggcgtaaaatgttagtggtgttatccacctgttgggcttcggtggcgagcgtatgggtgtcgagtgtcaggcgcagatagccgagcggtccgtttttacccgcaattggctcgacaatctgctggttaaaatagccgcctgcttttttaccgtcgagcgccagccggtcgcgcacttcgacgctttcgccagaacgtgcgataagatcgccttgttcgtcatacacacccgcgtcgaggatacggctttcatccgttaactgatcgaggatcgcctgaatgcgtttttcatccggactgtcggtacgcatcagcggtgcaacgttcagcgtcacctgacgcgccagggtgcgggccagttcttccagctgtggattacgctgtcgctggtggttttgactaaaccaactcgctccctgcatcagcgccactaacaaggcaagacagaacaggacaatcactgcccgatgcagccggaatttcagttttgtgcgagccatcttccaccctttgaaaatttgagacttaatgttgccagaagcaatggatacaaggtagcctcatgcgttattttccctgcttcgaacgattttacaggagccttaatgcctaacattacctggtgcgacctgcctgaagatgtctctttatggccgggtctgcctcttagtttaagtggtgatgaagtgatgccactggattaccacgcaggtcgtagcggctggctgctgtatggtcgtgggctggataaacaacgtctgacccaataccagagcaaactgggtgcggcgatggtgattgttgccgcctggtgcgtggaagattatcaggtgattcgtctggcaggtagtctcaccgcacgggctacacgcctggcccacgaagcgcagctggatgtcgccccgctggggaaaatcccgcacctgcgcacgccgggtttgctggtgatggatatggactccaccgccatccagattgaatgtattgatgaaattgccaaactggccggaacgggcgagatggtggcggaagtaaccgaacgggcgatgcgcggcgaactcgattttaccgccagcctgcgcagccgtgtggcgacgctgaaaggcgctgacgccaatattctgcaacaggtgcgtgaaaatctgccgctgatgccaggcttaacgcaactggtgctcaagctggaaacgctgggctggaaagtggcgattgcctccggcggctttactttctttgctgaatacctgcgcgacaagctgcgcctgaccgccgtggtagccaatgaactggagatcatggacggtaaatttaccggcaatgtgatcggcgacatcgtagacgcgcagtacaaagcgaaaactctgactcgcctcgcgcaggagtatgaaatcccgctggcgcagaccgtggcgattggcgatggagccaatgacctgccgatgatcaaagcggcagggctggggattgcctaccatgccaagccaaaagtgaatgaaaaggcggaagtcaccatccgtcacgctgacctgatgggggtattctgcatcctcagtggcagcctgaatcagaagtaattgctcgcccgccatcctgcgggcggcacagcattaacgaggtacaccgtggcaaaagctccaaaacgcgcctttgtttgtaatgaatgcggggccgattatccgcgctggcaggggcagtgcagtgcctgtcatgcctggaacaccatcaccgaggtgcgtcttgctgcgagcccaatggtggcgcgtaacgagcgtctcagcggctatgccggtagcgccggggtggcaaaagtccagaaactctccgatatcagccttgaagagctgccgcgtttttccaccggatttaaagagttcgaccgcgtactaggcggcggcgtggtgccaggaagtgccattctgattggcggtaaccctggtgcggggaaatccacgctgctactgcaaacgctgtgcaaactggcccagcagatgaaaacgctgtatgtcaccggcgaagagagcctgcaacaggtggcaatgcgcgctcatcgccttggcctgccgactgacaatctcaatatgttgagcgaaaccagcatcgaacagatctgcctgattgccgaagaagagcaaccgaagctgatggtaattgacagcatccaggtgatgcatatggcggatgtacagagtagccctggtagcgtggcgcaggtgcgtgaaacggcggcttatttgacacgcttcgccaaaacgcgcggtgtggcgattgtcatggtggggcacgtaaccaaagatggtagcctggctggcccgaaagtgctggaacactgtatcgactgtagcgtgcttttggatggcgatgccgactcccgttttcgcaccttgcgcagccataaaaaccgcttcggcgcggtgaatgagctgggcgtcttcgcgatgaccgaacaggggctgcgtgaagtcagcaaccctagcgcaattttcttaagtcgcggcgatgaagtgacctccggtagcagtgtgatggtggtatgggaaggaacgcgtccactgctggtggagattcaggcgctggtcgatcacagcatgatggcgaacccacgccgcgtggcagtggggctggaacaaaaccgtctggcaatcctgctggctgtgttgcaccgtcacggtggtctgcaaatggccgatcaggatgtgtttgtgaacgtggtcggcggcgtgaaggtaaccgaaaccagtgccgacttagcgttactgctggcgatggtttccagcctgcgcgacagaccgctgccgcaggatctggtggtgtttggtgaagtcgggctggcaggggagatccgcccggtgcccagcggtcaggaacgaatctctgaagcggcgaaacacggttttcgccgggcgattgttccggcggctaacgtgccgaaaaaagcgccggaagggatgcagatttttggcgttaaaaaactctccgacgcgcttagcgtgttcgacgacttataatgagatatacggagggagatatgagcagttttgattacctgaaaactgccatcaagcaacagggctgcacgctacagcaggtagctgatgccagcggtatgaccaaagggtatttaagccagttactgaatgccaaaatcaaaagccccagcgcgcaaaagctggaggcgttgcaccgttttttggggcttgagtttccccggcagaagaaaacgatcggtgtcgtattcggtaagttctacccactgcataccggacatatctaccttatccagcgcgcctgtagccaggttgacgagctgcatatcattatgggttttgacgatacccgtgaccgcgcgttgttcgaagacagtgccatgagccagcagccgaccgtgccggatcgtctgcgttggttattgcaaacttttaaatatcagaaaaatattcgcattcatgctttcaacgaagagggcatggagccgtatccgcacggctgggatgtgtggagcaacggcatcaaaaagtttatggctgaaaaagggatccagccggatctgatctacaccagcgaagaagccgatgcgccacagtatatggaacatctggggatcgagacggtgctggtcgatccgaaacgtacctttatgagtatcagcggtgcgcagatccgcgaaaacccgttccgctactgggaatatattcctaccgaagtgaagccgttttttgtgcgtaccgtggcgatccttggcggcgagagcagcggtaaatccaccctggtaaacaaacttgccaatatcttcaacaccaccagtgcgtgggaatatggccgcgattatgtctttagtcacctcggcggtgatgagatcgcattgcagtattctgactacgataaaatcgcgctgggccacgctcaatacattgattttgcggtgaaatatgccaataaagtggcatttatcgataccgattttgtcaccactcaggcgttctgcaaaaagtacgaagggcgggaacatccgttcgtgcaggcgctgattgatgaataccgtttcgatctggtgatcctgctggagaacaacacgccgtgggtggcggatggtttacgcagcctcggcagtagcgtggatcgcaaagagttccagaacttgctggtggagatgctcgaagagaacaatatcgaatttgtgcgggttgaagaggaagattacgacagtcgtttcctgcgctgcgtggaactggtgcgggagatgatgggggagcagagataaccgtgatgaaactgctcaaaggcgaggtataaaatgagtttttttgatgagttgaaaacctctctggaagaggctgtcgagattaaacaaggtttgaaaaaacctgcacgggtgacccgccacgaaattgaggatgctaaggctgttgtagaccggaaacggtgttcacgccgcatccggcattcggtgctcaatgcctgatgcgacgcttaccgcgtcttatcaggcctacagttttacaacgtattgaaattgctggttttgtaggccggataaggcgttcgcgccgcatccggcattttacgcattacttcgcaatacgcttgtacttgatacgcttcggctccagcgcgtctgcgcccagcgtgcgtttcttgtactcttcgtactcggtaaagttaccttcgaagaactcaactttaccttcatcctggtaatccagaatgtgcgtggcgatacggtcgaggaaccaacggtcgtggctgataaccatcgcacagcccgggaactccagcagggcgttttccagcgcgcgcagggtttcgatatccaggtcgttggttggttcgtcgagcagcagcatgttgccgccaacctgcagcagcttcgccagatgcagacgaccgcgctcaccaccggagagttcaccaacgcgtttaccctgatcaacccctttaaagttaaagcggccaacgtaggcgcggcttggcatctcggtgttgccgatcttcatgatatccagcccgccggaaacttcttcccaaacggttttgctgttatccatactgtcacggaactgatcaacgctcgccagtttcaccgtttcacccaaagtgatggtgccgctgtccggctgttcctgaccagagatcatacggaacagggtgcttttacccgcaccgttcggaccgatgatcccgacgatcgctcctttcgggatgctgaagctcaggtcatcaatcagcagacgatcgccataggatttacgcaggttgctgacttccagcactttatcgcccagacgcggtccaggtggaataaacagttcgttggtttcgttacgtttctgatattcggtgctgttcagttcttcaaagcgcgccagacgtgctttacctttgctctgacggcctttagtaccttgacgtacccattccagctctttctcaatgctcttacgacgcgccgcttcttgactagcttcctgcgccaggcgctgatctttctgctccagccaggaggagtagttaccttcccacggaataccttcaccgcggtcaagttcgaggatccagcctgcaacgttatcgaggaagtaacggtcgtgggtaatcgccacaacggtgccttcgaagtcgtgcaggaagcgttccagccaggccacggattcggcatccaggtggttggtcggttcgtcgagcagcagcatgtctggtttttccagcagcaggcggcacaacgctacgcgacgacgttcaccaccggagaggttagcgattttcgcgtcccagtccggcagacgtagcgcatccgccgcacgctccagctgtacgttcagattatgaccgtcgtgagcctgaatgatctcttccagacggccttgttcagcggccagcttgtcaaaatcggcatccggatcggcgtacagcgcatacacttcatccaggcgtttcagggcgttaaccacttcactaaccgcttcttcaatggactcacgcacggtgtgttccgggttcagctgcggttcctgcggcagataaccaatcttgatgtctggctgcggacgcgcttcaccttcgatgtctttatcaatgcccgccataatgcgcagcagggtggacttacccgcgccattcagacccaggacaccaatttttgccccagggaagaaactcagagagatgtttttcaaaatatgacgtttcggcggaacaactttgccgacacgatgcatggtataaacgaattgagccacgttggacttcgcctctatgtttatcgtgataatgagttttcaaaggcgaagtgtagcctttttccccgcctaatcccagccggtcgatcaccctcgcagtaaaagtaaaaaagtgtccgtaacgtggcgtaaacggcaatgactggttagcataaatctattacgcggcatgacgctgcattgatgtatttacacttagaggatgcgcttgtggaaaaagccaaacaagttacctggcggctgttggctgccggtgtctgtctgctgacggtcagcagcgtggcgcgagccgacagtctggatgagcagcgtagtcgttacgcgcaaatcaagcaggcctgggataatcgacaaatggatgtggtcgaacaaatgatgcctggactgaaggattatccgctttatccctacctggaataccgccagatcaccgatgatctgatgaatcaaccggcggtgacggtcactaactttgttcgcgctaaccccacgcttcctcccgctcgcacgctgcaatctcgtttcgtcaatgaactggcgcggcgtgaagactggcgtggcttgttagcctttagcccggaaaagcccggaactaccgaagcgcaatgtaattactactatgcgaaatggaacaccgggcagagtgaagaagcctggcaaggggcgaaagagctgtggctaaccggcaagagccagcctaacgcctgtgacaagttatttagcgtctggcgtgcgagtggtaaacaagatccgctggcgtatttagagcgtatccgtctggcgatgaaagcgggtaacacaggcctggtaacagtgctggcagggcagatgcctgccgattaccagactatcgccagcgcaatcattagtctggcgaacaaccctaatacggtactgaccttcgcgcgtacaactggcgcgaccgattttacccgtcaaatggcggcggtggcgtttgccagtgtggcgcggcaggatgctgagaatgcacggctgatgatcccaagccttgcccaggcgcagcagcttaatgaagatcagattcaggagctgcgcgatatcgtcgcctggcgtttgatgggcaacgatgtcaccgacgagcaggcgaaatggcgcgatgacgccattatgcgcagccaatctactagccttattgaacgccgtgtacgaatggcgcttggcaccggcgatcgtcgcggcctgaatacctggctggcgcgtctgcctatggaagcgaaagagaaagatgaatggcgttactggcaggcggatttattgctggaacgcggacgtgaagctgaagcaaaagagattttgcatcaactcatgcaacagcgtggtttctacccgatggttgcagcacaacgcatcggcgaagagtatgagctgaagattgataaagcgccgcagaatgttgacagcgccctgactcaggggccggagatggcgcgcgtgcgcgagttgatgtactggaatctcgataataccgcgcgtagcgagtgggccaatctggtgaagagcaagagtaaaacagagcaggctcaactggcgcggtatgctttcaacaaccaatggtgggatcttagcgttcaggcaacgatcgccgggaagctgtgggatcatctggaagagcgattcccgctggcttacaacgatcttttcaaacgctacaccagcggtaaggagatcccgcaaagctatgcgatggcgattgctcgtcaggagagcgcctggaatccgaaagtgaaaagtccggtaggggccagcggcttgatgcagattatgcctggtacagcgacccatacggtgaagatgttctctattcccggttatagcagtcctgggcaattgctggatccggaaacgaatatcaacattggcaccagttacctgcaatatgtttatcagcagtttggcaataatcgtattttctccagtgcagcttataacgccggaccagggcgggtgcgaacctggcttggcaacagcgccgggcgtatcgacgcagtggcatttgtcgagagtattccattctccgagacgcgcggttatgtgaagaacgtgctggcttatgacgcttactaccgctatttcatgggggataaaccgacgttgatgagcgccacggaatggggacgtcgttactgatccgcacgtttatgatatgctatcgtactctttagcgagtacaaccgggggaggcattttgcttcccccgctaacaatggcgacatattatggcccaacaaagtccctatagtgcagcgatggcagaacagcgtcaccaggagtggttacgttttgtcgacctgcttaagaatgcctaccaaaacgatctccatttaccgttgttaaacctgatgctgacgccagatgagcgcgaagcgttggggactcgcgtgcgtattgtcgaagagctgttgcgcggcgaaatgagccagcgtgagttaaaaaatgaactcggcgcaggcatcgcgacgattacgcgtggatctaacagcctgaaagccgcgcccgtcgagctgcgccagtggctggaagaggtgttgctgaaaagcgattgattttgtaggcctgataagacgtggcgcatcaggcatcgtgcaccgaatgccggatgcggcgtgaacgccttatccgtcctacaaatacccgtaatttcaatatgtttggtaggcatgataagacgcggcagcgtcgcatcaggcgcttaatacacggcattatgaaacggactcagcgccaggatcaccgcctggtgatagacgctggcgcgagtgagtttcccggcggtaaacacgccgatcgccccttccttacgaccaatctcatcaataccggtataacggctcatcacgggaccaagcgcctcaccttcacgcactttttccagaatcaccgcaggcaacggcaaagtagcgctacgcgcctcgccgcgctggctggcgttttcaatcaccacccaactgaaagtgctgtcaccatcgatgccagcttcaatcgccacccaaaaatcagcctctggaagtaaacggcgggcattggctacccgatttcgtgcgccagcgcgcgtttcctcactgccaaagggctgttccggtacaccgctctcgacggcaacggatgcaatatggcaggatccttcgccgaagatctcgtgaaatgcctgcagaatggcctgaattttagcgggattggtggtcgcacagacaacttggtgcataatcagcattactcagaaaattaacgttacagcagtatacggaaaaaaagcatgttacaggtatacctagtccgccacggtgaaacgcagtggaacgccgagcgacgtattcagggccagtctgacagcccgctgaccgccaaaggtgagcaacaggcgatgcaggtggcaacccgtgccaaagagcttggcattacgcatatcatcagtagcgatttaggacgcacccggcgtacggcggaaatcatcgcccaggcctgcggctgtgacatcatctttgattctcgcctgcgtgaattaaacatgggtgtgctggaaaaaagacatatcgattctctgaccgaagaagaagagaactggcgtcggcagctggtcaatggcaccgttgacgggcgtattcctgaaggcgagagtatgcaggagctcagcgatcgcgtcaatgcggcactggaatcttgccgggacttaccgcagggaagccgaccgctgctggtgagtcatggtattgcactgggatgcctggtgagtacgattctcggattaccagcatgggcagagcgccgcttacgtctgcgtaactgttctattagccgcgtggattatcaggaaagcctgtggctggcgtctggctgggtcgttgaaaccgcaggggacatcagccatctggacgcccctgcattagatgagctgcagcgttaacgacggatcggaatcagcagttcacagcgtagattaattgggcgatctcccgctttggcatcttctgccgggtagtatcgctcaatatcctgacctttacggcgcgtcaggttgagcattggcatgcacgttccgtataccgtcaggataaactcctgcacgccggttcccagaccttcataggtaaacatcacatattcgccgccctgcagcatcaccggatgccccgtcagtacatagccatctgcctgatcctgggctaacgcggtggtatagaatacctcttgctcgtcgtctttatcctgactcggacgcgtttcattcaggccgtagagcaccggcggaatggtcggcgcgttgccgagaaaatcgtgccagaactgataacgcatttcatggcggaaatcagagatttgctccaggctacaggagtagctctgggtaacaccaatcagcggcgtatcttccagggtgacaaatttgtgctctggcatagtgaattcacccaggcgtagcggcgggcgaataccaaaggcgctccattcaggagaacggcggtaaagtgcaggagtctgggcaaactgcttcttgaatgcgcgggtaaatgtctgttgagagtcgaagcggtattgcagcgcgatgtccagaatcggacgcgcagtcaggcgtagtgcgaccgcgcttttgctcaaacgacgagcacgaatatacgcgccaatagcatggccagtgacatctttaaacattctctgtaagtgccacttggaataacctgctttcgccgctacattgtcgaggctcaggggctgatccagatgaccttccagccagattaaaaggtcgcgaataatgccggcctgatccataaaatatcctcatcctttcaacaacgagcacctgacatcaggtaattggataatagcattttttgctgttttagcattcagtgtttttttcttagtagagtatgttttagggcttgacggaaataaaagtattgagattttgttcttaatcaatatgttatttaccgtgacgaactaattgctcgtgtaatagataaaaatggtaacaatatgaaatacaagcatttgatcctgtctttaagcctgataatgctggggccattggctcatgcagaagagattggtagcgtcgacaccgtatttaaaatgatcggcccggatcacaaaattgttgtggaagcctttgatgatcccgatgtgaaaaatgtcacctgttatgtgagccgggcgaaaaccggtggtattaaagggggattgggtctggcggaagatacctccgatgcggccatttcttgtcagcaagtcgggccgattgaactgagcgatcgtattaaaaacggcaaagctcagggcgaggtagtattcaaaaaacgcacgtccctggtctttaagagcttacaggtcgtgcgcttttatgatgccaaacgcaacgcgctcgcttatctggcttactccgacaaagttgtagaaggtagcccgaaaaacgcgattagcgcggttcctgtcatgccgtggcggcaataacagaggcgatttatgcaacgggaaacggtctggttagtggaagatgagcaagggatagccgacacgctggtctacatgttgcagcaggaaggttttgccgtcgaggtctttgagcgaggcttgccggtgctggataaagctcgcaagcaggtacccgacgtcatgattctcgatgttggtctgccggatattagcggctttgaattgtgccgccagttactggcgctccatccggcgttacctgtactgttcctgacggcccgaagtgaagaggtcgatcgcctgcttgggctggaaattggtgctgacgactacgtggctaaaccgtttagtccccgcgaagtgtgcgccagggtgcgcaccttactgcgtcgggtgaagaagttcagcacgccgtctcccgtcatccgtattggacattttgaattgaatgaacccgcggcgcagatcagctggtttgacacgccattagcgctgactcggtatgagtttttattgttgaagacgttactcaagagtccgggccgcgtctggtcccgccagcaactgatggatagcgtatgggaagatgcgcaggacacctacgatcgcaccgtcgatacccacattaaaacgctgcgtgccaagctgcgcgccatcaaccccgatcttagtccgattaatactcatcgcggcatgggatatagcctgaggggcctgtaatgcgtatcggcatgcggttgttgctgggctattttttactggtggcggtggcagcctggttcgtactggccatttttgtcaaagaagttaaaccgggcgtgcgaagagcaacggaggggacgttgatcgacaccgcaacgttgctggcggagctggcgcgtcccgatttgctctctggggacccaacgcatgggcaactggcgcaggcgtttaatcagctacaacatcgcccgtttcgcgccaatatcggtggcattaacaaagtgcgcaatgaatatcatgtctatatgaccgatgcgcagggcaaagtattgttcgatagcgcaaataaagccgttggacaggattatagccgctggaatgacgtctggctaacgttgcgtggtcagtatggtgcgcgcagcacgttgcaaaatcctgccgatcccgaaagttctgtgatgtatgttgccgcaccgattatggacggcagccggcttattggcgttttgagcgtaggcaaaccgaacgcggcgatggctccggtcattaagcgtagcgagcggcgaattttatgggccagcgccattttgttggggattgcactggtgattggcgcaggcatggtttggtggatcaaccgctctattgcccggctcactcgctatgctgattccgtcactgacaataagcccgttcctctccccgatctcggtagtagcgagttgcgtaaactcgcgcaggcgctggaaagtatgcgcgtgaagctggaagggaaaaactatattgagcagtatgtttacgcattaactcatgagctaaaaagcccactggcggcgattcgtggagcggcggaaattttacgcgaaggtccgccgccggaagtggtggctcgttttactgacaacattctgacgcaaaatgcgcgtatgcaggcattggtagaaacgttactacgccaggcaagactggagaatcgtcaggaagtcgttctgactgctgttgatgtggcggcattattccgccgcgtcagcgaagcgcgcaccgtgcagttggcagaaaaaaaaatcactctgcatgttacgcccaccgaggttaacgttgctgctgaaccggcgttactggagcaggcgctgggaaatttactggataacgccatcgattttacccccgagagcggttgcatcacgctaagcgccgaagtggatcaggaacacgtcacgcttaaggtgctggataccggtagtggtattcctgactacgcgcttagtcgtatttttgaacgcttttactctttgcctcgtgcaaatgggcaaaaaagcagcggtctggggttggcgttcgtcagtgaggtcgcccgtttgtttaacggcgaagtcacgctgcgcaacgtgcaggaaggtggcgtgctggccagccttcgacttcaccgtcacttcacataacttcaaattcttcccacatagtcttcgtatcctgctgccattgcaaaggagaagactatgttgaaatcccccctgttctggaaaatgactagcctgtttggtgcagtattgctgttgttgattccgataatgctgattcggcaggtgattgtcgaacgtgctgattaccgtagcgatgtggaagatgcgattcgccaaagtaccagcgggccgcaaaaactcgttgggccgctcatcgctattcctgtgaccgagctttatacggtgcaggaagaggataaaaccgtggagcggaaacgaagttttatccatttttggttacctgagagtttgatggttgatggcaatcagaacgtggaagaacgcaagatagggatttataccggtcaggtctggcacagtgatttaacgttaaaagccgatttcgatgttagccgtcttagcgaactcaacgcgccaaatatcaccttaggcaagccatttattgtgattagcgtcggggatgcgcgtggtattggtgtggtgaaagcgcctgaagttaacggaacggcgctgaccattgaacccggcaccgggttagagcaaggcgggcagggcgtgcatatccctttacctgaaggggactggcggaagcagaacctgaagctgaatatggccctgaatttaagcggtaccggcgatctttctgtggtgcctggcgggcgtaatagcgaaatgaccttaaccagcaactggccgcatcccagttttttaggtgattttctaccagccaaacgggaagttagcgagagtggttttcaggcgcactggcaaagcagctggtttgctaataatctcggtgagcgttttgctagtggcaatgataccggctgggaaaacttcccggcgtttagcgtcgcagtaacgacgccagccgatcaataccaattaactgaccgggcgactaagtacgccattctgctgattgcactgacttttatggcgttctttgtttttgaaacgctcaccgcgcaacgtttacacccaatgcaatatttgctggtggggcttagtttggtgatgttttatttgctcttgctggcgctttctgaacataccggttttaccgtggcatggataatcgccagtctgattggggcgataatgaacggtatttatttgcaagcggtattgaaaggttggtgcaacagcatgttgtttaccctcgcgctgttgttgctggatggtgtgatgtggggactgctcaactctgccgatagcgcgctgttgttgggaaccagtgtgctggtggtggcgctggccggcatgatgtttgtgacccgtaatatcgactggtatgcgtttagtctgccgaaaatgaaagccagtaaagaagttacaacggacgatgagttacgtatctggaaataaggttgaaaaataaaaacggcgctaaaaagcgccgttttttttgacggtggtaaagccgattaatcttccagatcaccgcagaagcgataaccttcaccgtgaatggtggcgatgatttccggcgtatccggcgtagattcgaaatgtttacgaatacggcggatcgtcacgtctacagtacggtcgtgcggtttcagctcacggccggtcattttcttcagcagttcagcacgggactgaattttgcctgggttttcacagaagtgaagcatggcgcggaactcgctgcgcggcagcttgtactgctcgccatcagggccgatcaagctacggctgttgatgtccagttcccaaccattgaacttgtagctttcaacgctacgacgttcttcgctgacagtacccagattcatggtacgggacagtaggttgcgtgcacgaatcgtcagttcacgcgggttgaacggtttggtgatgtagtcatctgcaccgatttcgaggccgagaattttatcgacttcgttgtcacggccagtcaggaacatcaacgcaacattcgcctgctcgcgcagttcacgcgctaacagaagaccgttcttacccggcagattgatatccatgatcaccaggttgatgtcatattcagagaggatctgatgcatttccgcgccatctgtcgcttcgaaaacatcatagccttccgcttcgaaaatacttttcaacgtgttgcgtgttaccaactcgtcttcaacgataagaatgtgcggggtctgcatgtttgctacctaaattgccaactaaatcgaaacaggaagtacaaaagtccctgacctgcctgatgcatgctgcaaattaacatgatcggcgtaacatgactaaagtacgtaattgcgttcttgatgcactttccatcaacgtcaacaacatcattagcttggtcgtgggtactttccctcaggacccgacagtgagtaaaacggctgtcatcctaaccattttaacagcaacataacaggctaagaggggccggacacccaataaaactacgcttcgttgacatatatcaagttcaattgtagcacgttaacagtttgatgaaatcatcgtatctaaatgctagctttcgtcacattattttaataatccaactagttgcatcatacaactaataaacgtggtgaatccaattgtcgagatttattttttataaaattatcctaagtaaacagaaggatatgtagcattttttaacaactcaaccgttagtacagtcaggaaatagtttagccttttttaagctaagtaaagggctttttctgcgacttacgttaagaatttgtaaattcgcaccgcgtaataagttgacagtgatcacccggttcgcggttatttgatcaagaagagtggcaatatgcgtataacgattattctggtcgcacccgccagagcagaaaatattggggcagcggcgcgggcaatgaaaacgatggggtttagcgatctgcggattgtcgatagtcaggcacacctggagccagccacccgctgggtcgcacatggatctggtgatattattgataatattaaagttttcccgacattggctgaaagcttacacgatgtcgatttcactgtcgccaccactgcgcgcagtcgggcgaaatatcattactacgccacgccagttgaactggtgccgctgttagaggaaaaatctagttggatgagccatgccgcgctggtgtttggtcgcgaagattccgggttgactaacgaagagttagcgttggctgacgttcttactggtgtgccgatggtggcggattatcctagcctcaatctggggcaggcggtgatggtctattgctatcaattagcaacattaatacaacaaccggcgaaaagtgatgcaacggcagaccaacatcaactgcaagctttacgcgaacgagccatgacattgctgacgactctggcagtggcagatgacataaaactggtcgactggttacaacaacgcctggggcttttagagcaacgagacacggcaatgttgcaccgtttgctgcatgatattgaaaaaaatatcaccaaataaaaaacgccttagtaagtatttttc
